United States Patent Application Publication US 2009/0215711 A1 - sequence listing, part 5

SEQ ID NO: 459 - DNA, 753267 bp, Homo Sapiens
  misc_feature (1)...(753267): n = A,T,C or G
tctgtgtatagaggatgtgctgaatggtgcgctttgaggcggcggcggcggaggagcagaatccgccgcgactggcagcctcggctgaccggctcggcttctcttcgccttccgaggctcctcatccaccgcgggctccagacctcgcgtcccgcccggggcatggccgggcgctgcgcccccgcgcgctctgcctgctgagcggcgccggagggaggtgcggaggccgggaggccggggaggccggcggggagcagagtcgagcgcctccggagcagagaaaggagcccgcgccccgcgccccgcgccccgcgcacggtccccagtccctgccgcgctcgcccgggccgcccggagcccagatgagcccagatggccggggctcaacccggagtgcacgccttgcaactcaagcccgtgtgcgtgtccgacagcctcaagaagggcaccaaattcgtcaagtgggatgatgtaagtattggggcggcccgagtcggggcgctggctcgggcaccgggcagggcgggcgtcgtgggggtggggcaaggggcgcgttatgcaatgggcgcactgggagcgggcaggggcagcctcgggcgcacaggttggcatctgccaaagcggatgtccaagggcagaagctttgcgcgcgctcctgtttcatcgggcttcagtagttgccatcctttctgggtctggcaggcgccccctgagggtcttacatcttttgggccagtggagagggaggggcaagctttgcctggtgacaggtcctgagagttcggaaagtagggagtgtgaagttgggaccaactggaaagcgcctggtgtgaacaaatcgcgtccctctccgcctgcggacgcaccccctattacctcttttgcccgatttcaagaaggaaggacctgaagttcaaaacactttagtgattgcgaaccctcttggcgcttttgtgggagccaaggcggcggaggacacaacggtccagccaacaggtggtcgttgatgccaaacttcagcgcctggctccggagtgagggtccctgaaaagggctgcggggacacatctggggagggcgtgaacagaatgggggcccttgaggggtcctggagggctcatgggcctgcaggcaagtggggagggctgacttttgagaactgagctgattggagtcttctgcctgaaatagacaggttgagagtttgccccacgatttacctgcaccgtttgccaggtagggcagagcctagcccagcgccggggtctctaatgctttacgagcggcccagaccccaggacttcaaatgacttccccttcccctctaccccagttgtcttcaaaacacgtaaattagttatccagctgaaaacatgcgaatcttcggatggagaacattatggtatcagttttatgtcctgggtgtcattctaaaggttcgataagaaaaacctactgaaataaacccgagttgccaggctctaagcaaatttaagtccaaatgactaatacatctcttaatcagaaggaattataggagaatgaggcgttcttcttgccgaaaagattttccacctagtaaattatagcctgttatcctctagggtatttttctttaatcttcttaagccattttccagtgtctgaaaacaatttaaatattccaggtagtgaatccaattacttagctgagtgcgtctgtgtctatattttgtccagctggaagcgcaaacggaacttggagtatgaaccacagcttccttgaaagctcgtgccaattattaaatgctgtaggcaaggatgtaaacatacatctttttaccatgggcttcacacttttcttctttctgttccagtctaattgtactgaatgtttctgtaaatggaatagaatctaaacaataaattcagacgcagattaaatgctttgtgtcagggaaaaaaaagacaaagaaaatgcagttcagcaataaacaagacggtcttgcccattttgagatccttgaatagagaggtgatgtgatgatggatttactgagaaagagagtgaagggcagaggaaagagaaagagactttgcagaatttagaaaagggagtttcagcgtaagctctggatttgtatacagtgatgattctaaactgtattttaaataattctctataatttcttgtttgggagagaatagccaacatcacattgagaatgaaagtattctatgaaaacacattttggtatatccaggtagatgactttcattatgtgcatttctgtaacacatatttcttgctcacctattactgccaatcctggactggattctggggtggtgaaaaaagtagacaaaatccctgctgttacggaccttacatgctaggtggaggagacaaaaatcatcaaaaacaccaatgagagagagattgggtgatgcattgagggtaatagagaggacgttagtgaaataccaaccaaagaagaagttgaaaagagctccttctgagcattgcagcagtgagtttccaaggaagccctcctgaaagaaaggacatagtcactaaggagaagaccagaagaatttcaggtcttttttaaaaaaaaaaaaaaaacctagactgcactcaggagtcaagttatctggaatataatgagctatcttgcaggctctttggttctctgggtcttcatgctgatcagtggactacaagggacccagcctttcttaaggttgcctttctcttccccaggcatcccttttctactcttctcagctcgtatttgcccttccagaatcaagccagttcaagttatctggctatttatattgtaccttagtgagacagtgtgttgaagacaaaaaagaaccagatcttgaatcaaaggcctgagtttacctcctagttctttcaccagtaagctgcatgactttaggcaaatcacttagcttctctgtatttttgctgcttcttgtgtaaaagcgtggtaatgttacaggacattcaaaaatgatgaatttggggctgtttaggatgtgtagaaattatctcttgttcctgaagtgattaaagcagtataatcactggtcttgttgtcttgaccaccatatggaatggaagatgtcacccagaggttgcagtgccatgcataatttgctggccacctaccaagtcacagtgaggctgtggatgctctaagggtggtagtcgaaagctttaacataggcactaaacaatcacaacagacagcaggggggtaatagatcctggagataccctgttgtaccagggccaggcgttaatatttttgctgcttggtcatggggaggtctgggagtccccagggtctgtggatgggtgggtaggtagctggagtttttttgactatttcagtattttaaaactcatggtgtatattgtctgaacatcaaggctatacctgtccttctgaacttggcatgaagataaaggactgacctaatgatatttaaaaaattcaacctcatgtctttgcttttgttttgcatttgtctgttagcaggctctggtggtaggaggtgggtgtaaaggactatgggtatttgtgggagaattctggtgaggtagacagtggaaggagagttactttcttgatctaagctagggagcttgggagattgtgagagaagctcctctctcttctggatcttggccttggtctatattgggcaggacatggagagaaagagcaaggactgtaaactgtacaataggacccccagccactgatttggccctgttttccatgcctaagcactctgtctcactgtcgcacaacctctgagggatggaagggttttcatttatttattccttctgtttcttcattcttacctttcaaattcagatcttactgtgggcaggttgcttaacgcatcccaacttcagtttcctcaacggtaacatgcaaattgtaatatttcctaactcagaacagctgttgaggttaaataaatgaatgcatatgcattgctttgtataaagcctgacatacaggcaaccttcaataaaacatgtttttaaaagttattgtcggccgggcgcggtggctcaagcctgtaatcctagcactttgggaagccgaggcgggcagatcacaagaccaggagatcgagaccatcctggctaacacggtgaaaccccctctctactaaaaatacaaaaaattagccgggcgtggtggcgggcgcctgtagtcccagctgctcgggaggctgaggcaggagaatggcgtgaacctgggaggcggagcttgcagtgagccgagatcgcgccactgcactccagcctgggcgacagagcaagactctgtctcaaaaaaaaaaaaaaagttattgtccctcaaaaataagatggacgtgaattttatcaaggtgattagcaggtgttctatggctcttttattctactagtggaaaaattcagaccttacttccattccctttaatgtgtgttttgattttatactttataatttggagaaaaatcaggtttctcaccttcttttaaaaatccaggtgtttcacggaaaataagtacgtaatttagagcaggatccattctctacagcaagtcagtttacaaataatccaaaagtttatttttacttaaattccatataaaatatatttatgtatatatgtgtatataatttaacattgcacgttctgtcttacaagcatattctaacatggaaaaataattgctagactaagttgtctgagaagtctgatgaaactcagaagtttggatttgcgttaatgccatctggatttgaatcaagtaactccctcctttaccacacctccaacccccacagctaaaacaggtaatttaagaaatactagtatattgcacacttcccagcatcctacacaaaagcttagaacttttgcattatgtggaatctgctgttccagtttccaaaatgatgacaagtaaatgatgacaagatgacactcacaagattaatgagagagcagaggggaaaagggtttgcgaggtgggaatttagtagcgttcactttggaaaggttatgggaaacagggaggaaacttctctgagttggtagctggctgatgtggatggagcaactacaaagtgcaaggtggattttagaatggaaggctagcagatgccctctaaggagccacttaaatttgcccagttatgtccatttttcttgtccaaagagctttgagaatttctcattggcagtcaataattactgtaatctaagtgtaagagcataactcttttgcaagcaaatcaataaaactacttgaaactttttaaaaaatcagtgtaacatgcgtacaacaaaacacacaaatcctgtgtccagctggatccattttcacaaagtgaacattgccatgtcatcagtaccagatcaagaaacagcatcacttgccccagaattcctgagtgctctcttccagtccctacgtccccttctaagggtaacccttatcttgacttctaactttatagtttggttttgcttgtttttaatctaataagctatttttactttgaatgaaaactttaaaaaaaacctcttcagcctaaaacatttttattattgctgaactgatcctcttgaacaacagcaacaaaagtgacttacagtcagtttagatggccattgattgggttcttgtctgtcccaagtctgggaagtatagcaggtatagtaaatgccctgaaggagcaaacagttcaacaaaaccctagtaatttacagaggaaatgtaatgccttcaggctgttattggcatggcaaagctgactagtacagtactgttgctggaatataattttctctcataggttttctctcttatcttgcttaacactaatatttccccacctatggtgaatgaggataatttgcagtggctattagtttcatttgaaagtttagcctatcagtaaatagcttcaagttatatttatctgcaatggtatataaatggaatgggaacattttacttttttatgtgggatttggtaaactgtaaatgtttccttatcagaattgtttcatgttatcatgaacaagaatcgccagcagaaaatggaaggggattgctggtgaattgttgactaacgctatgggtctccacttaaataacaaacccctggtaactgaaatcattggtcttcttgttactggagctaataattaggttcatgcaacctttcagatcatatcataaattccaaatgctcaggcatatttcacagtcttttccatctaatcttttccctttctgttctatgtctgatccccctaagcagagccttgtgcccctatgtgtaagtaggcaaaggaaatatagacatatttctgaggtcatttacatatatgaccataaaaaagccattgatttttgtaactaactaactgaaataggatataaaggaactaactaattggaatagattataaaggatgcttatgttctttaagagtctctctggttttcctctgatctctttaagagctaatgttcgattttattatcattaccatgtgttaattctcaaaatttttatttcaatttgtattccaaaaatggtttgcatgtacctattaattgaggttgactaaatctatgcatttatcaagaaactaaattattataaattgagtaacaaactattatataaaattggaaaaaagttatttttatttatactaaaattattttatttatattaaaacagaaataaaagcatcctacatctgtcttttatttcaagggtttttttttttttttttttttttgagacagagtcttgctctgtcacccaggctagagtgcagtggcaccatctcggctcactgccaacctctgcagccgggttcaagctattctcgtgcctcagcctccggagtatctgggattacaggcacatgccaccatgcccagctaatttatttttatttttatttttagtagagacgggggttttgccatgttggccaggctggtctggaactcctgacctcgggtaatctgcccacctcggcctcccaaagtgctaggattacaggtgtgagccaccgcacccggccttcaagggctttttttgtttacaatatttggttaatgttctgtttctttttactgaattgacgtttaatgtacaagatcacagaaagtggattagttagtaaagaaaacatttacctgaagtagtcacatggatatcaatatatagcattgatatctagaagattaagatattattttgccattaaaaaaaacattttttttggaagttgtctatgaaatagttaagagtaagggaaatttaatttaattttaatccattttatagaagaagccatacaagctcatgaagctggaaaaccatagagcgaatcagcaattgatctggtcaaaaaatgttaaagatgccaatcatgatcctccccaggtgtgctgtgttggatatggttgaatctcacatagcatcgattcctacatcctcttagtaggacttcttataatacaaaatctggacttctaaagctacatttaccagactcctttttgacgaacattcttcttgaaaattaatatttccaccaaataaattcatgcatatgagatatggagggcagaaacattaaaggggccaatttcctgcatcctttgggttgtttctacagatacgtgagaagctaaaagaggtgggactttctgtaatagttcttcagtgtctctgagaggcagtggtgacagtggccactccctgttggcagcttacacttctttggcttcaacaaagctggtgttttgtttggaccccgggagttccttcttgatttctcacctttctgaatgtggtagatacaatagctctccccaagggtctgtgctgctatgttctgagatcattcatggagagccaacctaaagcctgctcctccaacccttccagtttttctgtcaagtgcttactttatattaagtccctttatcttcaaaattcaagagaaatttctgtttctcgcaccaaatcctggctgatatggccttttgcggttctaggatttcacagctttcagtcctaaatataataatcatctaagtatcctacatagttttctccttcagtactactgttgagtaaaatgaagttttgctgtaatatttcctctggaattcaaaatccagactaagtcctaatagcaggcattcatgcttatatagcagccctgcttacccctgttcagtcattaagaccacctcgggtggtaggaaaaagagcaagcgtttgtcttttgcatttcacgtagaagcaaatcgaggctagtgattgtgatttgtcgaagggcacataactaagtagatctggaataggaatttaaaactacgtcttctggccaaattcagtgtcctttccagtctaccatgatgtccccgaacagggtccttttagtaacaacaacaacaacaaaaaactttttatttttttatttttttttttagacggagttttgctctttttgcccaggctggagtgcaatggcgcaatctcggctcaccgcaacctctgcctccccggttcaagcgattttcctgcctcagcctcctgagtagctgagattacaggcttgtgccaccacgcacagctaattttgtagttttagtagagatagggtttctccatgttggtcaggctggtctcaaactcctgatgtcatgatccacccgcctcagcctcccaaagtgctgggattatagatgtgagccaccgaacgtggccaacaaaaagcttttaatagagtctaaatgaatacaagtttgaagagattgatagacttttccaaagaatctctgttatttttaggattcatacatatgaagcttagatccctgcaaactcagtttttgagctattgtcttcaaaatagctctttttcatggtgtatgtacagtccgtttttgtctacactgtgcaagatgtgtgagcattggaaaacctcattgctgctttgagacaaaaagggcaggccagccgcagtggctcacgcctgtaatcccagcatattgggaagccaaggcaggtggatcacttgaggtcaagagttcaagaccagcctggccaatatgatgaaaccccgtctctattagaatacaaaaattagctgggtgtggtggcgcacacctgtaatcccgaccactagagaggctgaggcagaagaatcacttaaacccaggaggcaggcagaggtttcagtgagccaagatcgcgccactgcattccagcctgggcgacagagcgatactccgaaaaaaaaaaaaaaaaaaaggagggggcaatgtatgctctatagtctttaaagatattctacatcagtcagtcagcgtggaaacatgcatgtggaaagacaggtattcaggtatggtgttaaaggtctttttttcattgtcgagtaagtgacatttctgcattcagcaagactctttatatctgttactccaccttttcttcttctcgacatacgtgtaaatgttgtcttttgctgattcctatttaggcttgtctcatggcctctcatagaaatcatggaccatggaagaacaagaatatggtagacatgaaggaaatgtagagggtgagttgcctgctctcaagcacgatgcagaatgcaagacagtgtcaactgagaggccagatctatattacttgtgcagggaggtagataggccttgtttatattacaactagagcaggacttctggagggctatagctttataattatcattattatttttttccctaggggagagcataggcctggcactgggaggtgctgatgctcaggggatatttgtggaatgaaggaactgtctggtgtttgtctggctcacagtgggttcacacaggggagtgtgcagccttgaggcagacctggagggcagtcatgctcctatgagaccttcgtgacctttgaggtgttgtgttacattggttggaacaccttgctccttgtccttccattccatctgaaatctcctagggtcctaagggactctgtgaccttcttaaatgggatttctccatgtgtgtttgagaaggaaactatttattggcaatgcagagctcactgctgttacagtgctgatttcatttaaggtccaaatatgtcttaagattgagtgtatactacactgcaattcaatattggttgaaggtgatgatgcttaatgtatttatttctcatattctaaattttaccattagttcctattttctgaaaaatatgctcacccatacacccaaatattgcaatgaaaagcccttaaagaaattcagaagcgttgggagtgacagaacaaaagatgcatggttgtgaaaacatcctatcacgataatgattcacaaagagaaaaaagaatacttgtgctttattgctaaagtgagaaaagtaacaagacatagttctaaatctgatttataatgaacttccacctacactattctttgtgtacagaggcaatggaagtccctggaacaatgcttttaatttcctcctttctccactcctcgtttaatgtacttgggccacctccattattccagctgccctcctgcccctgagaaatacctcaccttctgcatttatattttggagctcgaccttcctggcatctctgaatcctgacttcattattatctgacaccactcccctttcttttaacagtgtctatatgagtttcccctcagttgaagctttcctaagaacatagcaatatgcctttactagtaaaaatcccaacctcaaaaccaacacaatgttccccagtcccttttcctcctttagttaccgtcttcttcttcatctccttccctctactatgcaagtgtaacttatagtcactgtctccctgtccttacctcctacctacttcttctcagccttccaaagtctttttctgccctcaccactactttgaaatttctttatcatggctgtgggcaacatggctcccagcaaccccaactgatgtttttcagaatcttccttgtttttatttgctgcagtaccttccaccccttcatccattcattcaccagtcatactttaaaaatgtactgatgtctcttttaagcattgtgctagtgttgtggattgatgatgattaatgatttcatgcctgcccttattgcggagacagatgctaagcaaatagaggtacaattattttcattataactgctatgaaggaaaaaaagtacaagtgagtataggaagcatggaaggtttccctggaaaattctatttatgacaagtgggatttaggccagcatgagtagaagaatgtgtcaggtggagggaacagcaggtgtgggtattccaaagagccaaagaacacaagattttgaaggagagaagcagaattagcacaggagagtgtggctcagataatgtggttggatggcaagggcctgcatatatactgcgtaggtccttgcaggattttagacgtataaagtcaaccagaaaccattaaaaccatgttttcaaccctggcaccattgacatttggtcccagtagttttttgttgtggagtctggcctgtgtattatacgatatttagcagtatccctcgctctagatactgggtgtcagttgcaaagcctcccagtagtgacaaccaaaattgtctccagacatagccaaaagtcccctggggtgcaaaattgctcccagttgagaaccactgatgaaaatgataaatgatatactatgcttttaaaagtatccggccagttcactgccctccccgccaccccaaaggccaataagtacatgaaaagatgtttaacatcattagtcattggagaaatgcaaattaaaaaacacattgaggtgccactgcatacccaccagagctatatgttactgaaattattggtttttctcatctgatgcccccactaagccaggagcacctcggttgatttgggatctgggctttaatttggttctctcgtggattatctgaaggatcttgcacgacacttgaagaacaattcttccaacatttccctacattgtgttaaaagggatttttctgcttgttctgtaggaagccagtatcttcacattgcttctctccactgttttgcaccctctactctggaccttcttcatctcttctgcttttctttattttgggaaatttcagagtagagacactcctggaggaaaagtctcatcaatgctgatacacgtggatgttttactccaatgatcttaattcctcacctggcatccaagactacgtttataatgttttcatttcatagtcagggctgtattgctcatgtttagtttgacaagcatcacatctgattttctgtgacccttagaactctttgcccgttgcatagctgttttccccccagtgtctctatttgctgtatttggccctgctgcttcctgatgcaagtcttgggcaatccctgtggaacatcgcttgttacttttcctgttgactctgtggtatcgattagtttagacgtgcatgcctctattcatgtgtgttctcttgtaataccataaaaacatgagaatcgctgtggagtgagaattgtggtcaaccttggccaggagactttctgacagtggtgctgaggaatgtgccatgggtctgtggactggcccttgacatgagccttgaggtttagggttatgctttgtagtagtttactaagacttccatagcaaaggaccatagcctgggtggattacacaacggaaatttattttctcacagtttgggaggaagtgggagataaaggtgtcagcagggttgcttcctgctgagggccgtgagggaaggatgtgtgccaggcctctcgtcttggctggtagatggcctgcttctccctgcatcttcacatcattttccttctgtacatgcctgtgtccagatgttctcttcttataaggacaccagtcatactggattagggcccactctaaggcctccttttaacttaatcatatctgtaaagaccctatctctaaataagatcacactttgaggtactggggattaggacttcaacatgtgagttgttggggaggaggccacgataaacctggtgacatacctccgcctggtaaagcgtagctcagagggtagcaacatgacagctctagttagatattgaagaactgacacttagagaagaagttagatttattttgtactatttaaatgttaaaaattaaatggtagctgcatatgtggataaaaccataaactgccttgctggaattgtgtgacaagagcactgagattgctttgtgagaaatctccctgttaaagagtgtccctgtgaaggtttggagttgccctgcctaacagaaatatagcgtgagccacacaggacacttgtaaatgttctagtagcctcattaaaacaagtaaaaaagaaacagatggaattaatacgaatactatatttaatttaatccactgtaggcattttgacatgtaatcaatgtcagaaatcattagtgagctattttctattcctgtttccattcttagtctttgaaatcttgcagcacatcttagtctcagcagtcgcatttcaagtgctcagtagtcacaagggagccacagcagctcctgtactggacagcaccagtatagggcatccattctcaacaggggccatgtcgcttccaaggaaacgaaaagtggttttggggaacaaaagaaatcttcttactgtttttgttttttttgttttttttttttttggtataaggcacagttatacatacagcatataaacagatattcagcctatctgcaatattgaagtgtcatgggggatgattagaaaaataaaaacctaaaaagcctcccttgcagggcaataatggaaaaagttgagaagcactgttatagagtgcgtacttgaaggtttaatttccagtgcttcccataccagcttaactggctttccttgaggaagtcacttagcccaagccttggtctaggtatctgtaaaatgggaataataatagtgtctacctcttaagttattgtaagtattaaaggagaaaagccacgtgaagttcaccacagtgattggctcagagcaaatgttgagaatgtatcagttactattcagtcagggatttttataaaaaggtatactggtattagaagtgagtttggattagtggtgcctttgtcatttcgtctcagtttctttagtatttattattgacttatatcagtgcattgatgagcaaatcattgtaatgttaatgttgattccagtgactcttttttttcttgctgaattgtttctcattcttcaggatttcgaggttttgttaaggtcttttgctttgccccttgattgtttttgatttggcttaaagactctttagagattcatgtaaattactaaataacatcttcttaattactatattaatcttcactatttatgatataggaatgacagtaaaacgtattatatcaaataaagagcagcaagtagaaatttactgaacattatctgctattactaacttaagacaagtatgtttattggttttcttttttacagacaaacatttatcagaaaaaatacaactttaagtaaattagagttgaattcttagaagcaatatactcacaagatatggtttgcctgcattctaaggtcacaggtgttcttggaggtaaacatcatcctattcctgacccaaagcctcacctattgtaggcctacatccgtggttttgtaagtgtggcccctggaccaacagcatcagcatcaccatgagcttcttagaagtccagattttcagactccgtcccagagctactaaatgagggactctggagaaagagcccagcaatctgtgtttttacaagatctctcagtgaacttgatgcataggcaagtttaaaaaccacaatcttatgaaatacacacatgttatagatgttgatggagaggtaaaggattaaaatatagaccatctgagagctgtcttcatcattctacagtcaaaggtcccaagagtcgcaacccatctgcagctcctttgtcaatgaaggatggtcatatatttcaagtttcaaacctgggcatatgttctgacaattaagaatatttgggatctgggttgagtggctactttggtatggggagaatatagatactagcagctatgtgggaggtgggaaaacaagcaggtggaattgaaaatagacattcatatatttctgggtcagatcctactttgcatggcaagaatgccaagttccagctgatcttggaatgttagaggtgattatgaaggaagcgggcagggagccgagataaatgatcacttaacagaggaactgtggccggaagagtggggtcaagaaaacattgaacaaagaagggttaattttgaaggaggggaaggaataagctagaaatggaagtatctgaaacaaactaggcagcatagaacagtgttcctaaatataaattttgaaaagttttttttttttttttttgagacggcgtctcgctctgtcacccaggctggagtgcagtggtgcgatctcagctcactgcaagctctgcctcccgggttcatgccattctcctgcctcagcctcctttagaagttttattctgctcacttaaatatttgattgtatgggatccttgcagggaatcgccaccaagattttgattagaattttgtcagatgctctgataagaaaagaaactgacctgaaaaagataagttacacctacagtttattctaaagtcctctagaagtgggaatgtgtgctgtgtgcagcctgtcaaaacttttattttggcaacttctagaagtaacaaaacaggactgaaaatattgctatgatttattggaaacattggtgtgagctgttatgcatgcaatctcatgaaagaagcctaaactattttaaaaattagtctttcattataatatcgtttatttccaaatgtctttttttgacatttagaagtaattgggaaattttaaaattctagctgaagttccttgcaacagcacggtccttgtaaaagatatttttcaaactgcatgttaaggatgtatatatggaatatcagcataaaacagaatggcagttcctcaaaaaatgaaacatagtactatcatatgatccagtaattccacttctgggtatatactgaaaccaaggactcagatagatatttgtgcccctatgttcataacagcattattcacaatagccaaaaggtggaaacaacctagatattcatcagtggatgaatggataaacaagacatggcatatacataaatggaacattattcagctttaaacaggaaggagatatgacacatgctccatgaatgaagttttaggactttatgccaaataaaataagccaaacacaaaaggacaaatattatacaattttacttatataactacttagaatactccaattatttaattacctggagtagtcaaattcatggatacagagagtaagactggtggttgccaggttataggggcaagagggaatgaggagttagtgtttaatgcatgtggcatttcaatttgggaagatttaaagttctaaagatggatggtgctgatggcagcacagcaaggtgaatgcatgtaataccactgaaaggcatattagaaaagagtaaatgttatgttctgtatattttactgcagtaacacagaatatcctgataaacttacatttagtattttgatacatctgtttttaattataatccactataataataatgaacatttttatgtggcaaacatgcccagatgctttaccccaaattatcctagctatttctcacagcaaccttctgagttaggtattatgattattcccttcttttttcagttgtgtaaagctatgcactgagatgggacaggcaggaatttgaacccagagaacattttccagaaccaggctcttacaataaaacttaatatgtagattaaaatcattcatactgctctgcccattaggaagaaaaaagtcccaaatgccaaaattatctctgcaagttctaattttcattacaagttcttttaataagctagatgatatgacacactatggttatgtgtatgaaaaaattgaaaaaactggcaatttatgtctctctaaaaaatgcaattcctgcaaaggcctgagtgtttcagtataaaaatccatatccagtggcatgtattttcttgtgcagatggtatgtctttctgaaaattgctaagagaaaagaacacatattttagaaatgtttaatattataattacaatgtatccaagttttgctttatactatgcatgctttaaactcagaagactatttacctatgatgttttattttagcatgtaaaattgaaatttgcaacaagtttgtatatatctttctgaatatgtagaagatggccttatttactgttaccttggaaacagtgatgctcaaatactatgttttactctattacaattaaaaatcattttatggaacaaatgtaatttaaaatactattcttaagcatggattttagttaatattaatcataaaaataagtaatgatgtttagtgttaaaattatttgaaaagctaaatatagatttttaatagaaaacataccttaatcaataaatcataatgctttttcctttacaagttatgtataagtcttctgattattaggaaagaacctcagttacataatggataattccatgaagttaaaaatgccatgtctaatttcttttgaaatttttcttaataattgactactttggagaatctgtacaattattacttcttaaataactcctggatagatttttctacagtgatatatgttgatattcatgtttcttcttacatttctaggactcaactattgttactccaattattttgaggactgaccctcagggatttttcttttactggacagatcaaaacaaggtaagaaatgaggtatgcctttcttacatttttcagtcgtttactactttgaaaagtatttatgtatcttatctatagaagaacatccatttcacagatcttttgcagtttatttaaaggttctacttttaaagaatatctaaggtattcttaggacttaggacgtttcaaagtcactagtttgaaatattagatttgctaaattctagagcaattggtatttttggttctgtttatattatgtgttaggataagaacagggaaatttgaattacatttggtgtagcacataattagtcagcgttactgatttaagtccccacccataaaggatgaagaaaaatgatgagaaaataacttttgacccaatagccttaccccttggcttttctttctctctcttttcccctgtgctgttcattaaggactctctcagaatcagcaggaatttggccctgataatttgttgatgtcagaaaaccaagaataaaattcctttagcctattccttcagttgtcaggaatttcttactaaattagctttctgcccacaatagcatgaatttattatctcatttgttatgaagccaattgatgattctgtactgaattattaaaaagtagaatatctgctgatcataagatttatttggagtttaatgggcagttagatgagaacactcatggaaagtggttattatttcaagcatcgttgccacagtcctacacttgaacctcagaggccacagaatatagaatgtttttgttctctaagttttgatatatggagaaatgggatagggtttactgagaatgctaaatacatactgaaaacaatagaatagtaatagtataccattaaaacagctggaacctccacagttacggatgaaggaggaacaaattgttagctctttcaaaactctacattagtttcttatatccaaagttcctggagttgcctgtcagctttgccttctgtctctgaggcaagctcaattatacctgtgtctggtcccagggccactcctgaatgagcctgtttacacatcattcaaaaggtgaatttcagtcttgttgtcctggaattagactctaaatcagtgtgccctggaaccatgtgtggctgtagaagtggaggtaaaccacagaccctacgctaatgtcaaaaattgtatgagtaagatttcctacttaacgctcacatttattattgggtgtgttaatcgctttggcttagacattctgtttggtttcctgctgttatgtgtaaaacaatggcttgcaagaggttttgttttttgggtgtttttttcttctcctaaaggatatttttagaactgttgaaactatattcatgaacgatgtacttataatgcctagagcatttctaaacgttgggtatttgtacgagagaccaaactgtcagtttgatttttcaacttgtagatcaagcttctataaaagcaacagaagatattctgggatttttaaataattcatggcaactcagttaagctcccctctagaccaatcatcaatatttatttccttaataaagaaaaagggtttaggaccaaaggctctttgttgcatttctgttgtgaacccagtattttgacccatgcttattttcaaaggtaggaaaatttgttttcattttttacacaaacttttaaatcttggttgcaatgctgtttatgaccaagcgaaacagataatgtggtagcaattccttttatcatgttattgcttttcttttcatggatattactcttacagttctagccaagagatagaaatagtaaattttacttttcactttctaaatgccaaagtcatctctcagtcatttatcagaatttggaggctcatttcttagtgatcatatatcttagaatccaaaagatgagaggatttaagaaaaaaaaattaaacttaccatgctttcaagtttgtcattttctttctggcttgaagcccagccctggaaccagtaagagtgattcatccacttttaggagatggacgactccaagtgatgaattagagtaaatgtgtgctagaagaaatggtgcatgcaaataaaagatggcatgccaagcttttagtggggatttttttgcataagatcatttgaaggtacatgaatgaatggtacattcatgatgctacttagagggccactttttaaaaaatattttttatctggcaattagttttaggaatctgccacatgtaccatagagataatctctcagaaaacaaaaaaaaaatgtgatacctttaagtttatcccttgattttatacactgtgttttccattggttgggaagcttgcattggtatttattgtaatatgcctctcttcttcctttgggcttcttccaatatattccctctttggtccacgaagcttataccaaagcacttggattagcaatcatctgaggcctagtctgctcagaggtgagcagaaatccctagcagaggggattttacaagtgttttttatttttcttttttatagcattggaggtaaatggccacattttatgatgttctatgcatgtccgtctcttgtcatggctacatcagatcttgtatcagagccacttatttcaagccactggctttcccctctgtagacaatgacatgctaccttccaaaacccctcctttgatttgtcaccacagaaatgataggtgacaaagaagacagcacagatgatgaatttaggaattaaaaactaaagctagcgagtcatttttaggtagcagaaatgtgctttagtgaaacactgacaggatgtttggagttggtggaagcagataaatatgaatatcatttttagggataaatgttcatgctttgtaccagctctggacttattttaataattcttttcactgtattgttggctctgtaaatcttattgaataaaatgagcaaaaatgagtttctgaatatgactattttaagcagagtggtttttcttgtgtaagtgtaggtgatgtgaagaggatgaatttatctgtaagtcatgggtgagaagggagtcctgcacagcctgagtacttgagaggtggcctacattaggctataacttttctttggatccgtgccatgtgaacactagaaaccaacacaggaagtgttagctgtgaaaaccatgtgaactataagaatctgctccaccggttttgaaagaaaggctaaagaagaaaaaagtgtcaatgttaaagagctaaccaaaacctatcctgctagaatatgaaaaaaattagacctttgccttgcaacctgatgccctgcttctgtgccaaggttggtgtaaaaataaaactagtcaccactagttcagatccaagaagttcaatatagttcagtaaacccttccttgtcttcataaaactggagcttgggggaagggaaaaggaacacatcattaaatttgaaaaggaatgggaggaagaacacacggtttgcatgaagaactcccattactttcttttttgttacaaattttatttgtttttaatattgtggataatatacaaatatctttttatctgtaaaatagtaaagcaatgtaactatctttaaactgcactctcccattgactccaatcctagttctctattcagagtcaactaatagtaatagcttcatggtttcttcctaggtctcttttaaataaatttgtgcatgtgtaactatggaaatatttcattttgttttgcttatgtccatttttatactaagtcacatcatattaaccattctacaatttcctttttaccatatagtgtgtctcagagaacttttcaagttagtacatgtgtgtctatatcattccgttaaattggcctatcttagggaatttttcatgttagtacatgtgtatgtatcacattctttcatattgctctatcgtatgttaaacaattgattaccacattttatttaagaatacagaagttctcactggtggattcttggtgtttgtctctaatttggggttacaaagaatcctataatatggagtaatagtcagctgtgtgtagccctctctgggaatatgggtcagggattccctaaggtaaatgctcagaagtgcgattgctgatttaaggctatacctatcctaaattataatgaatggctgtaccattttataaccctacctgtcttatatgagtggaactgttttcttaagcccaaccaacagtaataggaaatattttaatttttgcctaactgatgcaactgttatatcaccttgttttaatctgtcgttgcctgatttgctagtaaactgtgtatattatcatacatttattgatcatttcagtttttccttacatggattgcctatttatatctcttgcccttgtgtggacagttctctgtgtattctagatgtactcctttagctgttataaatgttgcaattacactcttcctgtctgtggtttgtctttgactttcttaacatctaatttatgggtaacaaaagatgacttgaagctttaagttttcatgtagttacattccaactacctccccactttttgcttcctttaagatatttctgattccttctcatcaccgttattaatctaggtttttaatccatatgtaatgtattatgaggactggtgtaaggtggagctctaacttcaatttcttcatatcactcgtagagctgacatttcactacctggtttggatggcccaaagatctgttatgttttaatgcctgtggactgctgggttctgatttcctacttcattcttatctcatttattttctgcctttcttactttgtggttcaaaattgtaattctttttgtttacccgtgatcctatattagagatttaaatttatacctgcatatttagtcatttctggagacttagggcaagaaagattggttctaccattcatgccatctgccatcttgttctgccctgtgaatttgcatgagacaccattctggatgtttgtacagagtgatgattcagtttccattaatggcaaccatagatagtcttctcttatgataaccttaaatttctacagagttcaaaagcaaagtttaaaagttaaatatttacataagtcacagtaacatttttcagcatgagtccagagttcaaaaatattttgaatgatgcatcataaatgtcaacaagaaaatctagtgatttcctattaaaaatagtctggcttccataaagaactactgggtaccacacatttcattaatgatttttagcagtggggctttctctttgggatatgcttctctagggtatcccaaaattgtcaactttgacccttcttgtgtatagtaaatgggataggtcattcaagagtccactgagtgattaaatgcaatgatgtagttataaatttagaagataagtgctatttattttatttggtagctttctctaaaagttgaaacaataacttacattatctgggaaaaaaaccagcaaaattcacgtgaggattgctttgtgagggctgggattgttccttggcctggagcagtgtgtcagtcattgttgactaagcagcagcatctggggactaagtcctttccttcaccttccttgaatttccttcaccagtattgatgatattaatagctaaaacagacacagtgccatacccacaccctcttcctcaccactcctgagaacataagccgggctccagtggctggccagtgcctgcattcttttgctttgtctggctactagaactcatgttgctacccatgcagctgcccagaagttcctggcaattcacactcaccctcaccaatgggattcagtggataaataccacagctccctcacctcttgggtgggataacttaaaggtgcattctttatattatatcccagaactctctagtgggattaagcccagttacccacagtggcaactggcttgaaaatgttccccttatgggcttccttcccttcctgtctcacttctccactcctgattgtgttctaaaaccacctctaaaataaactacttttactagaatccttatctaggaactgcttaatgcagatgcatagtgcttaacaacttaatatagatgcccccaaatgaagggttttaaaatgattccttggttaagagagattggaacatattaagtgaacacttttatttgaagccaagtctgattttcctaaaacagtcctaatttgggaagcccaaagctggttgaggaaaccagctttgaagctgtgacagatgtggtttgtcacagtctggctctgctgtgtatttaatgagtcaccctcagtgaatctctttaaaaatcaaagccttggtttcattatctataaggtgggtattactctcttagtgttgttgtgaacattcaatgtgtaaaatgaatgacttagcataacacctgctactttgtaaactctccatcctttgtggtggcttttattattgctacataataaacaatgactctctgaccaaacaattgtccataagtattagagaccacaaaaatgtgctgttttgaaaaccaagtgaccatttatttatgtatatctttttattccttttttcttcttcaaggcaacactgacttgttttctatttagactctgctgtggtcttttgatctgaaacattgaagcttaggtctgtttgggcaaataagatgtttatttatgtatttcataatgttgtgggaacagagccatggaaggcaaaagaaggatttattgtttaaaagactttccctctggggataatttgctaataaatagtccatcataggtgaaagtttcttggacccttggaaatttgaagcatcgtatggaacaacttttaagatgatttagaggactttgataggagaaaattgtattattcacaagaaaaattggacacaatcatggttgcctatgcctttttcctaagatagtcactttaggattgtgacaactacatgggcatcaggccactcctcttcctccctactgaccaagaccttagagattaaacttttagtgtttttgaggatagtttagccactaagccaaggttcagattgctgaggaacaaatctatcctcaccatatcaacttccaggttaagtttttccatttttattaacattaccttcttttcacttctgtgactcctcagagattttgcaccagtgaactctggctagcatagaatagacatgtcatgatgccttagcttatgtagacacaacatacaaataaatgttattagaatggaatcatttacaagttcttcttagaggatgtgatgtatgatttttttggtagaatttctaattgaagtgtagccttttaaagtatattttaaaattaggctagtcattttgagatggtttcattgcagcttctttggaatcatttttagagtagaaatgcattagtataatttttatgtcacaatcaccacacttcattatgggcataacaacagcaatgcttgttttaatatattgtaaccagagtttagaaacatgtaataccacgaaaattcattactcctaatataatttaattacaaaattgttccttggtttcataagttgcatatatttagctcttcccactactttaggagaaattaaattggatactttccatgctatgaagctattataatggaatatttgtactttttgatgccaaaaaatggttcgagccattggattggcagaatatgtgaaggaaatgcattctgcatattgttcataattttacttcctgttacggagaaaattcctttgactttgttacaaatagaatccccgggtacttggtattgatataatgccatgctcttttgtttgaattacaaatgttgtaggtagagtaggcatttttggttgttctgtagttcattttcttgccaactcaagattgttgatggtactgatggagacattattgtattagtccattttcatgctgctgataagacatacctgagactgggcagtttacaaaagaaagaggtctcacccacaacatacgggaaatcaagctgagatttgggtagggacacagccaaaccatatcattctgcccctggagcttcccaaatctcatgtcctaatatttcaaaacaaatcatgcctttccaacagtcccccaaagtcttaactcatttcagcattaactcaaaagtccacagtcccaagtctaatccgagataaagcaattcccttctgcctatgagcctgtaaaatcgaaagctagttactttctagatacaatggaggtataggcattgggtaaatagagccattccaaatgggagaaattggccaaaacaaaggggctacaggcctcatgcaagtccaaaatctagcagggtagtcaaatcttaaagctccaaaatgatctcctttgactccgtgtctcacatccaggtcacactgatgcaagagatgggctcccatggccttgggcaactccgcccctgtggctttgcagggtacagcccccttcctggctgctttcatgggctggcattgagtgtctgtggcttttccaggggcatggtgcaagttgtaggtggatctaccattctagagtctggaggatggtggccttcttctcacagctccactaggcagtgccccagttgggactgggggctccaaccccacatttcccttctgcactgccctagccgagactctccatgagagcaccaccccagcagcaagcttctgcctggacatccaggtgtttccatacatcctctgaaatctaggcagaggttcccaaacctcaattcttgacttctgtgcacccacagactcaacaccatgtggaagctgtcaaggcttggtgcttgcactttctgaagccatggcccatgttctatattggcccctttcagacacagctagagtggcagggatgtagggcaccaagtccctaggctacacacagcacagggacccttgttccaacccacaaaaccattttttcctcctaggcctctgggcctatgatgggaggggctgccatgaagacatctgacatgccctggagccattttccccattgtcttgaggattaacatttggcttcttgttacttatgcaaatttctgcagccggcttgaacttctcctcagaaaatgggatttccttttctattgcattgtcaggctgcaaattttctgaacttttatgccctgtttcccttataaaactgaatatctttaacggtacccaagccacctcttgaatgctttgctggttagaaatttcttccaccaggccgggcgtggtggctcatgcctgcaatcccagcactttgggaggctgagttgggtggatcacctgaggttgggagttcggaaccagcctgaccaacatggagaaaccccatctctactaaaaacacaaaattagccaggcagggtggcacatgcctgtaatcccagctacctgggaaggctgaggcaggtgaatcacttgaacctgggaagtggaggttgcagtgagccaagatcgtgccattgtactccagcctgggcaacaagagtgaaactccatctcaaaaaaaaaaaaaaaaaaaagaaaaaaagaaatttcttccaccagataccctaaatcatctctctctagttcaaagttctctaaatctccagggcaggggaaaaatgctgccagtctctttgctaaaacataacaagagtgtcctttgctccagttcccaatgagttcctcatctccatctgagaccacctcagcctggaccttattgttcatatcattatcagcatttttgtcaaagccattcaacaagtctctaggaagttccaaacttttccacattttcctgtctccttctgagccttccaaactgttctaacctctgctttttacccagttccaaagttgcttccccatttttgggtatcttttcagcaacaccacactactggtacaatttactgtattaggccgttttcatgccactgataaagacatacccaagactggacaatttataaaagaaagaggtataataggattacagttccacgtggctggggaggcctcacaatcatagtggaaggtgagaggcacgtctcacatggtgtcagccaagagaaaagggcttctacgggaaactcccatttttaaaaccattagatcttgtgagacttattcactatcatgagaacagcagaggaaagacctgcccccatgattccattacctcccaccaggtccctcctacaacacgggggaattcaagatgagatttgggtggggacacagccaaacctatcacttgtcaagctctttctatatttaatcagcaagacaagtctctttttgtcttttgggaaaataaatttagattgatagttggattatttaaacatttatcacacacacacaaaatattaaaataaataatataattactttcttccactttaaaatattttaaatttactttaagtaatttaaaaggcaaaaatgcaaactttgaacaactgacttattaggacgttggtacctattataaataagtttctcaaatctagcaaagtatgtaatattcactaatttactttgcacatacctttttatcgttgttatcattatccttgttatccttagcatcaccaacagcaaacacatatatgctgttttatccttgccagacacaattctaataatatatagtctgtatatttatagcatatacatatttttatacatatatttatatagtatatgtagcataggtatacttatagtctataatagtatgtatatagtgcatatatgctacatatatacatacatagtgtgtctatatgccgtgctacatatatacatacatagtgtgtgtatacttacacatatatatagtgtgtgttaacagacctatgcaatttcgtcatttccataatcctatgaatgacagtgctactattatctacatttaaaagtgagtaaactgaagtgtgaacagaggttatgtcatgatccctggttgtacagttggttaatggcagagtcaggaatagaaacaacagtggcagtgcagtctggctctatgttctggctcttaactttttgctgtttaaagaacctgtttaatatgtaaagttaagtttgcctgcaggatttttttccttggatttgtttgaaaaagaaacctcagtaggcctagtacatttgctaggaacagacaaactgtatgaagaaggtattctcaagttgggctgcacaatgaaatcacagggggagcctcaaaggacgctgctgcctgggcttcctgtctccagagaatctgacttaattggtctggggtgtggtcagaacattggactttttttttttttttgaaagctcctcatttgattctaatgtacagccaaggtgaacacagatagaaagcaagctgaccttacaaattaattcagtaaacttcctgaaaggatgtgctcactttgcctttcctgcctgtgacgtggcctactttctactcagaagtaacactccacatgagcaactacaggccctaccagattctgaattatttgactatgactggataatattccttacactgtgcttagtaaggcaataaattactaggatttttttagaattagtctcaatatctaaggttgaatcaaaatagtttttttattatattctgtcgatgaaaatttttttaactttccattccctgaatgttacaggtattagctgtttgttttatcgttaccaaacatgtcctcagaattcaagtcctgtttattaaccttatatttgtgttttttgagacccttgtttagatcacagtactgtgtaaattccatacttaattaaattagctgcacccttgaatgagtgaatgtggttttaagaatgaccttatataactattttattttatagctaatttttcatttctgggatacaaaggcagatgttatcttattaaattgtagcattatgtcatttcttatcaatttgtaggaatccttccttaactgagacatacactcaactgggcaaaccagagagagctagataatttcaggtgtgataggaagtttgcctttcatcacctctacatgatacatttcagaatagtaaaattcacatttctcctgttagaatgtttggttttttattctgcttctatagggaatggggattgtggtaatgatttttcatgagatttctccctggcattgtgcaaaactccacttaggaacagtggtctgaaaattatattgcatcacggcaaacaatgcacctgtgtgaaatgaatgcttaagtgaaaagttttatgggacagagctagttgctatgctaagaaactaatgactgtgctggtatacataatggattctatttttagatgaacacttggtcctatagcatggcttcattatgcaagaggacagaagtttcagcgttatattgtgaatattgagacattaacatatcagagtatatgccttcttagatactaaagtgactttttcatatattttaaccctgacatagttcataactagaggaaaaaagtaaagaacaaaaacagaatttcaaaataatttcaggtttctggtgtttgtaggttgagtttttccaacagttgactgcaaggaaaggattcaagttcaagtggtttatttgggaggtgaccccagaaagtgtgggcagggccatggggaagtgagataggcaagggaagacagccattaaagggtgcactatcaaataagttaccatggtgtacaagtgaagctccgtcccattggagagccctgggagacagtgcagagaggagagggagcagtggtatacccaccagttcctaataatcagtgactgggggcagctctctcaggggttattttctcagctcttctgccagcctctcctggagactgaggggcttccaggccagtgggccctaggctttgagaaatccctcagacatagatgcagctggaagctgtccgttggcatacatgaaaacacatgggcaccaccagcagcaaccactctggtggctttaatttctggtaagtcagacttttaaaatctatatcgcagtgtgcaaactggagcctgcacccattcacgaacagttcttgcttggcctgtgcaaataattaaatacataaacatgagttgccagcatttaaaaatctgcaggttcatatacagatctggatttctcaaaaaatcagaaggcatggaaatgccggccgacatacccccatggccacatttggctggggcagtgcagcagctgcctgctttagacagggtgtgtggtatgcaatctgccacatttcccaccaggctagcctacctaatttacatgaacttttaagctcatttagatgtttgagtataaatatcgggcctctatggtaacatcctatactggaagcttcaataagctaatgattgcaaagcttcatatggaatgaggttaattctgtcacagtgggcctattggagtgctgtggcataaagactagatttttacagtggaaaaatggctgaagatcagcatatccaggtcttgctcgtaatggccataagcaaagcaattatgctccaatcccaattcttctctgtgatgtatggatctaaagtgtaggagccctgaggtccctctctgacttaaaaggctattattccaaagtgactttcaggtgtcattttgctaggtaagatttataaatatgagtccttggcaaaggattttcgtgtcgaattgggccattaatctagggaaaataagaatggtggactccaggacaccaggcagaatgacttcccttggttcccttggttgaatgaatgggattaacttcacccccagatcaaggcagtgagcattgactggtttagccaaccaatgtagtccacccttttctcaccgtagagctgtgctgtctcatacagtagcctctagactcatgtcactgtttacagttaagttttaattaattaaaattaaattaaaaattcagtttctcaatcccactacctacctttcaggtgctcactagccacctgtgtccaggtgccatttccatcattgcagaatatgttattggacatcactgcacagagcttggatcaggaatggctcttcagagccaatgcaaagtttcttgcaataagaagcttccttgaacttgtggggaaagaaactttccttctttttctggattatgtgctgcaaggatgtaatatctggactcacttttgttatcttgttcccatgaaagaagatattggagtagctcagatgccactttgggagctcaaaggggaagctagccctgcagaagacaagccagtgaagaaccaagtccttaatgatgtcatttgagataccagatcagtccatttcagttccatgaatgaatcaatccccttcataggctatgccagtttaagatagagtgtttgtccctttgcagttagaattactgactgacacattggacaatcatttatttgaaggaaggcagagactcaggtgttaaggatccagctaacatctggcccataaacttgaaagagaaataaaagcgggaatagaatgtgttaactctgtcagtggctatcattccctgtacaagacattattgttagttttgtatagttttctaatctgggctttaacatttcaaggataattttagtggcttctagccatcatgaggaaagaacatgtcttgagaaacatggggaaaattgaaaactgtacagagaatataagtttttggcaatgttgtatgttaacctaatagccttaatggtaccatgataatttctgggtaaggaaagtagaacttattaataaactgttgtgctgcagacattgtgccaaggtaccttatgtggacaaactatcacatgaattcatgaattgattgatttttttccattttgcattgaggaaactgaggctatggagagggtgatttttaccctggaagactctctctaaccctgccaatttagaatgaaaccctctcttctgttcttctggaataccttgtgccttcctttaccttagcactattaatgctatgttgattctgtctgactctttttcctttcccagtggatgatgaaggccttgaattcggggactttacctcatttgtttggcattttgaatacactgctaacatacagtcactgctcaatcgatgtgtgtcaaatgaatgagacttacaaaggctgtgcatcttgtctaaggttacaggttactaaatggtggaaagccagatctgtcaggtccaaagccaatgacctttcagtagttcattcattaaaaccctctccttcttgtttaaatctccagctgtcttactcttagcagtttatgtgacctctgcctcctggagaagagagaaaacacagtattccctgccaccagacctaatagcacactttcatttacagctgctttcctctgtctccctcttcctttcccagcccatcctttccactttgaccctggaccctagcttctcaatgatttcatactaaaattgatcccttccctttcttatgttgtcaatatttcccctgtaaccagatctgtacatcaatattaaacatgacatgcttacccatcttaaaagaaaaccctatatcccctcttgaccctcactggctacttcctttctttctcgctttcactcatagcaagcttcttcaaagacctgcctatgctctccccattattctcacctttcaccaacttttcaatacatatcaacctggattctgtacccactactcctccaaattagtctttcttaacccatcaatgaccttcacattttaaaacatgctggccatcttgagctctgtggtgcttgattatttttatataattttacattgttgataaccccattttcctcgaaacactttcttttcttgactttctttttctcctacctcttcctacctctccagccacatgttcgcaatctactttactggctgtaagttgcagtccttctctactcacatgttagggaatctcacctgcacttaaaacttattttaccatctggatacattggctcccaatttcatatcaccttccaataccctgttcctgagataccggaaagcaaacatttccaagattggtatcatgttcttcctcccttaaatcctgacctggtcctggtgccttattaaaggtaccacccttcacagagtggcacagtcctgaaccctgaaagtcttccttaacaccttcttttccaccttccctccaagttcttggcccctttccttttgtgctccgtccacaatagccgccttctgtttccctagacacggcatatttctttctgctgaaatttttcacaatacttttcctctgcttggaacacatgttttctccccatggattagcccctcccctgcttcaccacacttctcacagttgtaatcaaatgttttttacatagttatgtaatatctagctcccgtattaggtttttgactcaatgagagcagagtccagaggtgtccttgtccgtgtttaagacctggctctcttaatggggaaagtaacttgtagcattcgccaatttccatggtgtaaatactgtagtgtctgatttcgagatatggatacttcatcactgaacacagatttggaaagtgaagggtacagttggctctcataagcttacaagctttccccagctcacccccagggcagatgcttgtctgtcttattgactgctgtattttcatgagttagggcagtgcttggcacattgtaggaactccaagactattagttggaggagtgactgcagtgtttttattaccattggaaatatagtaaaaagtgctgatgtttcagagaaaaatgaaataattttttaaattttagaattggacccagcctgaaagtttatcatatgccatccctttgtttttcttcattagaattgagggtcaggaagtgagatctgccacaatcacatagctacctggtaaatgagcccaggttaaaatgcacatcttttaattaccgaccaacactccttctactgtagtgcattatcacttctaaaaggaaagtaatttctttccactagtgatttagttcagattgcattattagatagtgacgtagttgaatgtataattaaatctgctttacaaaagaaaaagcagtattttatcatttctttttaaattatgagttgtctcttaagagggatttctcttttatctttttcttctttaatattctgatgtacttatttatagaacaaagacattagtcagcttttgtggtgtagcaaaccaccccaaaacttatgccttaaaacaacaaccatttttttgaggtcacccttctttgggttaacaatctggtgcaggctctgggggatcatttttctggtctcaggtgggctccttctggcttctgcagctactcatgggttggatgtgtggctctgctgatatggctggcctctcctgtctgaggcttcagctaggatggctaggctgacttgtatctgtcccatgtggtctctcatcttccaacaggctagtccagcttgctctggtagttcactggcagagttctgaaacagggtggaagctgcaaagccctagaagcagaattgccatactggcacttctgccacattttctatgccaaagcaaatcattcataggttggggaaatagatgccacctattgatgacaagatctgaaaagtcacactgcaaagaggcatggttacagtgagaagaataatttgtgactgtttttgaattacatacaaaaaagtaatttcttcttcaaattagtagaagattgtctctctgatgggatagaactgactgatagcttcctcatccttctgaaatattaaggcaatatgaagtaccccacctggacaattgtgttaattatatatgcccaatattagagcacttacgctgcagtgaggtgggtgtctctcaccataccctagacttggaggtccctgataggtgttctgaaagaagatccctgtaaggttatagggaagtaaagccgcatcccaacatggtgcacagacagcagcctcctagcaacatctcttaaagcagatggtgttttcagacatattgaggaatgaggtgggttgggagcagttgcaacaagatagggaaaccttaagtcatctttgaggatactagtttgttgtgctattttttttcttcctaaatgatttggaagtgatttttctgtgcctgatgtagtcttttttttttttccctttctttgtatcctgtgttgggaaatggaaataattcaaaatctgtaaaaacactgggaaaatggaaattaaactttgggattctttactgcagaaaaatgatgatgggaaatgttcttcagtagagaggtagaaatcatttcagaccgcttctcctagccggggcccacaacatgcatttttctgggatgaaaacacatgagtttgaccaaggaaaagtttggtagattttgtcaatgaagcatgaaaagggatcagtctttactctgagctcatcttttttttttagctgagtgtgctcttggaagatgcaggcatcagtgtatttatatctgggtcaacagggcatgcggtgaaggggaaggaaggccattacctagtgaatgtatattgggtggggagccactgaggttaaaaaattcagcctactgccatctctttactttgggctgtatggaagttgttcatgacctccataattgttcttttgtaggataccctgtatcagattatagactctgaaatccaactcccagggttcaaaacctgccttgaacactatgtatctctgaggaagacatttaactcattctgagcttccattttctcttctacaaactagaaataataaataggaatcccatgaggattaaatgagataacacatctgaaacacttggcacaacacacatgctgataggtgcttcacaactgctactgatttttaggataaattttagtaaattttaatatatattgtgtgaatctgaactaggacaggtattcggatacttctgattcatattctgagtctttttgcacccaattggttgaaacatcagggcccccaaggaatgccagtgtctcaggttgcagataatactgccaagttgcagataaatccctgattggacaactatctaagagttagtagatccactcagactcccaggaacttggagtgcagttttcgatgcctgaattcagagaggacagggtgcgtggtgcatgtggcctagtctacaattgcttctggcctattgaatcttaggaatggaaggctgaaggggagaagatagtttgtcatcaaaactaaggttctggacaaatttggagggctcagttgctgggctggccctggagaatgagactgaattctcgaccctttgaaaacaggtgccatgtttgatttctttttgtgtcagcaatgcatcttctattaaaagaatggcattagggtctcagtcaagatggcctgaggcattcagttaagggtacactgatatattcctcctgctggtcagtgtcaagattctgctcctgttctctttcatccctgtgtacccatcttagatatttttgagtgcccatgatgtgctctttgttgtagtatctgagatctctagttggggaaacctaccaaagtaataaactattctatccattgttaggacaaataggaaaatcttactgactctaggagaaaatagcaggtatttctttctttctttttttttaaatagactatttcaaatcctaaagtagttttacttgatatttacagagcacatgtcataaactctatttaaaaacagaggtaaaaagggggaagcactgaaaaatataactcgagtaatcagtttcattcaaaatgtaagtgggagaatcagaatagaaaataatatgatttgcagatttattttaaatcagatctaaatttttagatttgcaaggtctgagtgaaaaaaaagagtgtcattgcttagaacttcttaggaaaacaaatcaataaatctgtaggaaataggctgtgtgctgaaccttatttggtttctgctttttgaccgagaagaagcatattatattgaaagggtatatacttggtacatagaaggaaggcgacctttaatctctgactttatataaacataaaaaccgtgaatagaaaagactgagcctaggaagaaataaaaaaggagccctgaatctatgaggctgagccatatgaaacagccataattgtaggccaaaaatggccaaacacaggcggtttctcataggccaacaatacagtcgttctgagagagcaacagcattacttttgcttagttgaccatctgattatgacagtttagaacctcatattgatgtggcaaacatgagttaacttctctattgttaatggatatgattttattctaatttagatctgatttaaaataaatctgcaaatcacattattttctattctgattctcccacttacattttgaatgaaactgattactccagttatattttcgagtgcttcccccttcttacctctgattttagatagagtttatgacacatgctctgtaaatatcaagtgaagttattttagtatatggtgcaacattttataaataacaagaaagagtatgctactttcaacaatatcatgtttaatatacataaaatatataagcatgtaaaatatatgtaacatatatacttaaaatgcatatacattatatacatttaactaagtacaaatataaatgttgcctaagaggtaagcttcaaattggaatttgagggaaataagcttcaaattcatttctcatatattcatcattttatttgttcatatgttatgttttttgttgttgttgtatgggagaggtactgatttaggttacttcttttgtagtagaggatggtagttaaaaatacatactctgaaccccatctgcctgggtttgaatcccagctctatcccttgtgagctgtgtgattttgagtaagtgacttaaactttctgcacctcagttttaatatatatgaaaaaaggataatattagtactcccttaaggttgtgttagggattacatgaattaatataatgtgtttggatcagtgcttatgttggaagcactaggtaagtgtttattattattacttctcattgtagtctcctttatgaaacgtgtgtgcatagcctgtctggaggatgactttttgtcttttaaagagagaagctgtactacttctactgtaccagaaattcatctgagagcaggttactttctcattgtaaagtccatgcaagccagataaacctatagggtagcacttccttaattagtttacaatttctgaggataggttggtgggagtaaactgcctctgagtgttcacttctctgggaactgtcccgtctgttgttgcgtatcatatgttctagtgcattttttttcagttatgtcctttcccacaaagcagtttggtgtaaccactgtaatcccagtaagctatggttggggtctatgtataggaatgtgcaccctgaaattcattcacttattcagcacaattttattgagcatctactaagtgttaggcactctctgtgtcagatatattatagataatatacaactacctaaatgcatagtaagcaagatattgtaccattgagagtagtaagagtgatgagaagagttcagggagggagtagtggtaactgttttacataggtactcaagaaaggaatctctgataagctgatctttgagcagagatttaaaggccgtgagggataagccatgtggttggttatctggaggaagaatgtcctaagcaaaagaattggtaaatgtgaaggtatgtgacttctgggatagtttgacaaacagttcaagaggccaattggctggagcatagtaaatggggattgggatcagtagtaggaggtgaggtcagagagattgctgaagacaagggcgaattatattaggtttttacaaccattgtaagggctttggcttttctctgcatgaaattcaaagatgttataaagttttaaatacagatgtgatgtgattggacttgtgttttttaaaaaaggatcactgagacttctgatctatacaagatggccagattagatattggacctgaacatttttctttgttcttcttccctaagtacaactatacatcccagacataatgtgagaggcaaccagcagaggactctgaaaggtgctaagaggaaggcagactggtttctggcatcaggaccagagaagcagcatggggcagggtatcttatgtttcccccagccagtaaaagaaggtgatcaggaccagcattttacaacctgtgacctagcaacagaaggtggttcaggaaagctccttcttttcatggagtccatccagtgtcaacagggaagcccagcaccattggcaaagggatcagtcgggaattcagttatggctagccatacatgggcagggtaaatgctcttcttcctgaccaggcctgggacttctccctctaccaagagatacaacacagggtcaccaggttgtaccagcaaaagggggcccatgcccatgacaacaagcagcctggcctgggatacctctttctccatgggtctgaaactcctctctcctgcccagagacactgagactgctgagtgacaccggtaagaggtatttcactacaacaagcgcttggcccatgaagcctatttgtctccatagacccaagatgctattctctcaccaagagacactgtagggtcagactgaaaaaaacctgtcagccctctcaggtacagggacctctggaagcccctctcatatcatctaaaccaagcagaccaaaataacacagcaaaggttctgaaaattaaaccatcggtggaatgacaacccacaaaagtagaccagaactcatgtgataaacttaaaccagggtgactacctgctaaaaggaaagatttgaatagaatttagtcttctaatatacaaaaataaaacgtccaggatacaactgaaagttgctcatcatactaagagctgagaagatcatggcttgagtcagaaaaatttagtcaacctcaagatggatcagattttggaattatcttacaagaattttaaagcagccaccataaaaaatgtttcagcagtcaaaaacaaattattttgaaacaagtgcaaaaatagaaaacttcagcaaaaaaatagaagtttttaaaaagaaccacatgtaaaggataaaactgaaaaatacaatggccaaaataaaagaacacaataggtgggttcaatagtagagtggaaatgatagaagatagtgtcagtgaattaaggacacattggcagaatgtactcaatctgaacaacagaagagataaaatagattttaaaaatgaactgagctccggggacctgtggaacaataacaaaatttctaagatttctatcactggagttgcagaagagacccaggggaattgggctgaggaatatttgaataaatcatggctgaaaatgtcccaaatttggcagaaaaacacaacctaagaatctgagcgcacctcaaacaggatacaccttagcaaatctacaccaagatacatcatgtgtaaacttctgaaaacaaaggcaaaggaaaaaaatcttcaaagcagactaagagaaatgatgcattaactacagagaagtaccaattcaaatgatagcagtttcttatccggaaacatggagaccagaaggcagtgcatctttcaatggctgaaagaaagtatctgtcaacagtgacttctgtgtccagtgaaaatatcctcctaggatttctctcagatgatgaaaactggaatttgtaagtagcagacccacccattaagattgactaatggaattttataaaacagaaaggaaagtatagaagaaggaaacttggagtatcagaaacagaaaataatggaaagagctgaaatatgtgtgcaagcaatagaccatcctatgcctcaacagtttgtaaattatatttgatggttgaaacattatgttagcatccgatactcaaggcaatgctatttaaaagtaggagtcagtaaagggacctaaatgaaagtaagatgatttccactcttcagctgaagtgtaaaatattgatacccataaaatgtaataaatcacatatgcatattgtattaggccaggtgcaagggctgatgcctctaatcccaacactttaggaggtcaatgcaggaggattgcatgaggccaggagtttgagaccagcctggccaagatagcaaattccatccctacaaaaagttaaaaataaaaataataaaataaataaaaaagatgggtgtggtgacatgcgcctgtagtcccagctactcaggaggctgaggcaggaagatgactttagcacaggaaattgagggggcagtgagctgtcactgtaccactacactccagaatgagtgacagagcaagaccccatctctaaaaaatattaaaagtaataataaaaactgcaattacttttgcaccaacctaataacaaacaaaaaccttacacttaaaaaatttataaagaaatcaagataaaatcctaaaaaatatttgactaacctccaagaaggcaagaaaaggaaaacagcagaacaaaaaccagagtaaataaatggaaaacaaataataaaaaggcagatgtaaactctaatatgtgaataaataccttaaaggtaaaagcaaagagaacctagatatagacccatacacatatgctctgctgatcttttacaaacatgcaaaattagttcaacaaggcaaaggacagtattttcaacaagtgatgatggagacattggatattcataggcaaaaaataagtaaaaataaaaaaaaaagtataaaatgaagttcaacataagcttcacacttcatataaaaatgaattcaaatagatcctagatataaatctaaaacataaaactgtaaaacttttaggaaaacacataggaaaatctttggaatatggatctaggcagagttctttgacatcaaatccatgattcataagaagaaaaattggatctcattaaaattaaaataatttctctgtgtaaaatcctaaaaagaggatgagaagacaagctacagactgagagaaagtgtttgtaaaccacatatctgccaaaggacttgtatctagaatacataaaggaccttcaaattcacaggaaaaaaaacaaaaaacaaaaaacctaaaccaaacaatccatttagaaaatgggtaaaaggtctaagtagacaatccactaaagaggatacacagatggcacataagcatatgaaaagatgtcgccttcattagccattagggaaatgcaaattaaaaccccagtgagttctcactgcacacctatcagaatggctggaattaaaatagtgacattaccaaatgctggcaagggtgtggaggaacagatcaatggtaggttaaacagtctggcagtttcttataaaactaaacatgtagttactatatgatataactattgtattatgaagcgttgatcccagaaacatgttttaaaagtatgttcacacaaaaaatctgtacacaaatattcaaagcagctttattaataatagcccaaactgaagatagaccagatgccttcagtgagcaaatggttaaataaagatggcatgtccatactgtgacatatgctactcagcaataaaaagcaatgaactattggtgtacttagcctggataagtctccagtatgctgaatggaaaaagccaatctcaaaaggtttcatactgtatgattccatttatataagagttttgcaatggcaaaattttaatgagggacaattttgtgtctgtaaagtgttaggcacaggcgtaggcagggagggaggctgctgtagttataaaagagcaacatgaggaatgcttgtggtgacgatactgttctatatcttgactgtggtgaggaatacatgaacctacagatgataaacttgtatagaattaaatacacacacatgcacacccacacacgcaagtcaaacgggggaaatctgaattagattaatagattgtatcaatatcaatgtcctggttgtgatattgtactatagttttgcaagatattaccattagggaaaattgggtaaaaggtaaaagggctccctctatattattacttacaactgcatatgaaatctgtaattatctcaataaaatttcaatgaaattaaaaggaacctccagagtagtgcctgaggactctcagtattagccttgacctcagaacatctctagacaaaagtgatagaatgaatattactttattaagagtttttcataatatattatcaccactcccttctcagtaatcagtagtataatattatgtttatagaaaaatatctcatggtatgtcaatgtttgttggtattaaaatcaaattaaaataattttacacgagagtgcaaatggctgacagatttaactcttatgtttttgtccccccaaaaaatcatatgttgaaacctaacccccacagtgatagtattaaaaggtgagtcttttgggaagtgattaggtcatgagagctctgccctcatgaatgggatttttgccctaataaaagaggcttgagagtctttttacctttccaccacatgagcattcatagaaggcaccttctgtgagaaatgggcaatcaccagacgctgaatctgccagcatcttgatcttggacttctcagccgccagaacagtgaggaatacatttctgttgataaattacccagtctaagtacggcattttgttataatagcctacctggactaagacgatgatgttaattcaaataaatatgactgctctgggagaaatgattttgggcaatatggctttattgctgctgtttctattctaggctgctactccctcctataagacacaagggcagaaatcagcaacttcaccctctgtttatgaagggtgctatgcagggcccaagtattattattattattattactatttttaaaattttactttactcatgtttgttctggtatgtgattcagctttttaaaaaacttttatttattttcaggggtatatgtgcaagttggttctatagaaaaattacaggtcccagggatttgctgtgcatattatttaatcacccaggtaataagcatagtacccaatagatagtttttcaatcctcaccctccttccactctctactgtcaggtaggtcccggtgtctattattcccttctttctggacagaaatgtgtactcaatgtttagctcccacttatacatgagaacattcgtgatgtttggttttctgttcctgcgttagttcacttagggtaatggcctccagctccatccatgttgctgcaaaggacatgatctcactcttttttatggctgcatagtattttgtggtgtatatgtaccatattttctttatccaggctactgttgatgggcatttaggttggtttcatgtctttgtttttgtgaatagtgctgcaatgaacatacatgtgcatatgtctttatgatagaattatgtatattcctttgagtatatatccaataatggggttgctgggttgaatggtagttctaaattctttgagaaatagccaaactgctttccacagtggctctgaactaatttacattcccaccagcagtgtataagtgttttttgatttttctgactggtgtgagatggtgtctcattgtggttttgattggcatttctctcatgattagtgacattcatcattttttcatgtgcttgttggtcatgtatttgtcttctgttgaaaagtctctgttcatgtcctctgcctacttttaatggggttgtttgctttttcttgttaatttaaatttgttatagattctggatattagacctttttcagtttgcaaatgttttctcatattctgcaggctgtctatttactctgttgatagtttcttgggctgtgaaggagctctttggtttaaattagatcccatttgtcaatttttgttttcgttgcaattgcttttggcatcttcgacacaaaattgttgccagggcctatgtccagagtgatatttcctgggttttcttcaggggtatttacagttttcggttttacgtttaagtctttaatccatttggagtttatttttgtatatggtttaaagaaatggtcctgtttcaatcttctgcatagggctggccagttatcctagcaccatttattgaataggcaatccattccccattgcttgttttgtcgactgtgtcgaaggtcatatggtagtaggtgtgtggctttatttctgggctctctattcggttccattggtctacgtgtctattttgtaacagtaccatgctgttttcgttactgtatagccttgtagtatagtttgaagtcaggtaatgtgatgcctccagctttgttcttttgcttaggattgctttggctattcaggctcttttttgattccatatgaattttagaatatttttttctaattctctgaagaatgtcattggcagtttgataagaatagcatcgagtttgtacgttgctttgggcagtatggccagtttatcaatattgactcttcctatccataagcgtggaatatatttctatttgtttgtatcatctctgatttctttgagcagtgttttgtaattctcaccatagagatctttcaactctctggttagctgtattcctaggtattttattctttttttgtggctactgtgaatgggattgcattatttatttggctctcagcattgatattgttggtgtatagaaatgctaccgaatttcatacattgattttgtatcctgaaaatttgctgaagttgtttattagatcaaggagcttttgggcagaggcaatagggttttctaggtactaggtataaaatcatatcgtctgcaaactgagatggtttgacatcttatctttctatctgcatgtcttttatttctttctcttgcccgattgctctggctaggacttccagtactgtgtcgaataggagtggtgagaatgggcatctttgtcttgttcttgtcccagttctcaaggggaatgcgtccagcttttgcttgttcagtataatattgactgtgggtttttcatagatggctcttattattttgagatatgtgccttcaatgcctagtttgttgagggcttttttttttttttttttttttttttttttgagacggagtctcgctctgtcgcccaggctggagtgcagtggcgggatctcggctcactgcaagctccgcctcccgggttcgcaccattctcctgcctcagcctcccaagtagctgggactacaggtgcccgccactacgcccggctaattttttgtatttttagtggagatggggtttcaccgttttagccaggatggtctcgatctcctgacctcgtgatccgcccgcctcggcctcccaaagtgctgggattacaggcgtgagccaccgcgcccggcctgttgagggcttttaacgtgaagtgatgctgatattttttaaaagcctgtaatcgtgtggtttttggttttagttctatttatgtgataaatcacatttactgatttgcatatgttaacccaattttgcatcccagggataaagcctatttgatcatggtggattagctttttgatgtactactgaattcagtttgctagtattttgttaaggatttttgtatctgagttcatcaaggatattggcctgaagttttccttttttattgtgtgtttgccagattttggtagcagaatgatgctggcctcacagaatgagttaggcagaagaccctcctcctcagatttttagaatagttttagtaggaatggtaccatattcccagggctatataagaaacagagttgaatttggttgaatttggaaacagagattaaggaataggccaaaagtgatgaatacaggggcatgtaatatactttcaggaatccaaagtccagttcattgaaaaaaatgtatttgtaaatttccttttaaattccaaatgaaaatttgggttaactcagaagaatatatgccatctaggataacaataaatgagcctaacagtctttaactatctggtgatatgggattgcctgaatcatggtacctctaaacattgcaacccttaaaactcatgctatgtgtgaataattaatgccacaggaaatacttatgagacattaaatttaaaaaaggaattgcatttgtcattttttcatacattcataatgtaaaagtgtgtgtgtgtgtgtgtgtgtgtgtgtgtgtatgtatgtgtgcgtgtgtgtgtaaagaagaatatgattgggaggccgagagaggcggattacctgaggtcaggagttcgagaccagcctggccaacatggcgaaaccccgtctctactaaaaatacaaaaattagccaggcgtggtggcatgcctgtaatcccagctactcgggaggctgaggcaggagaattgcttgaccctgggaggcggaggttgcagtgagccgagatcatgccactgcactccagcctggccgatagaatgagactctgtctcaaaaaaaaaaaaaaaaaaaaagaataagaaaaaaagactagaaaaatgtatgtcagaattgtaacagtgctttgctttggggaatgctaggaatgtgtgtgggatttagtttctttccaatgccattgtgcatcttcagatttctttatgatttctttaccttattgttgaaataaaaaaagcaataacaatacacaattattttttaaaaggaagaagtttaagcaaagggaaaactagcatatgacaaaatagctgaaaccagaggtagagcttataagccaatatgccaaaagaccctgcacttggcctttttagtccaagtgatctatattttagctgagtttcctagaagtatatacaaggattctcagtggtgactagaatgaacagactagctgttcaggaatctaatgcctaccatagctattaatagctaccactggctgttcgtggtggctcacacctgtaatcccagtgctttgggaggctaaggcaggaggatcacctgagtccaggagtgcaagaccatcctgagccacaaaggatgtctacaaaaataaaaataaaaaatatctgggcatggcgaatcacatctatagtcccagctacttgggttggtgaggcagaggatcacttgagcccaagagttacaggttacagtgagctatgattgtgccactgcactccagcctgagctacagagtaagatcctgtgtctaaaaagaaacaaaaaagctaccactaatactgatatttaagagatttctccagtatatacccataaagatgaaaaaccacatcttttagtgagtgacatccctgtaagacacaggggcaatagcgttcacaggaattagtctcatatcattctgagacacagatcaaaagtttttcattactagcaattctagcagatataaaaccatgtgaaccaggtgtgcagcagctttccagtgttgagtgtgaaggatgggtagctctaatattccctttcctgtggcatacctctttgcagtttgactttgtagatcctcccattgagagttggagactatttcctcaccctttaaaactaggctggggttgtgagtttctttgtctggtaaaatgtggtagaagtgatggtgtgtcatatctgagcttggtcttccagtggccttttgtgtttctcttttatcctgtggacccctacgtctgtcaagagaacaagctcagattatcctgccatcctgccagaagatgaaagatcatgtggaaaagagacgagtcatcctataccatcaagctcccatttgacttgccagttgatcacagttgattatcttttttttctttttttttttttttgagactgagtcttactctattgcccagactggagtacggtggcacgatctcggctcactgcaacctctgcctcccaagttcaagcaattcttgtgcctcagcctcctgtgtagctgggattacaggcgcccgcaaccatgcccggctaatttttgtgtttttagtagagacagtgtttcaccatgttggccaggctggtcttgaactcttaacctgaagcaatccgcccacctcagcctcccaaagtgctgggattacaggtgtgagccaccgtgcctggctgcacagttgattatcttatttgcagccactgagataaaatttgactctatatccttaactaactattagaataaccacaaatatgactcttctggttaaaaaagaactgttttttttggtatttgagcccgtgaagctgcattcagctgagctgggcccagatcagcagaaccattgatatgtcccatacacacatgagcaaagatgaggctttgctgtatgctgttgagcttttgtagttgtttgttatgtggcagtgttgcggtaatagatacatgatccatctggcttcatccttgtagagaaggagattggctatctttccttcagggttccagtcctggttcttcctttaactagctatgtggctttagcaaatattttaacatcattaagtggcatatgtaaaatggaaaaaaactaatttttgtctaactcacaaaattgctaaagtgaagtgaaatatatgtaaatgtatttattatctatacatcacaaggtaaaatttgattaatctaaaactctctgctctgtaataatgtactacatttaagtttttttccaatgcatttgatctttcagctactacataaaagaaataaacaaacataaggactattctaatgccatgccagtcacagtgttaaaataacttaggcatattttgataccccttgatatgtttatgatgaatttgaaatatactagagaagaaattttgtttagttttataagtgtggcttacagaaggagactttaaataaaataaacccaaacaagttttgatttactcatggacatgttttagttcggaatgtcaagtatgaatgtccgtctccagggatatcagggtgtgaatcagatgtgcatgtttcacaatccacaggtttccatatgtttttgaaatatagaaaaaacttcactaatttaagcttatcagcattcaaagttatcttatttgcagccactgagataaaagttaactctgtatcctaactagcttactatttgaataaccacaaatattggttaaaaaagaaccaaaaatagttatcttggtttgactgtaaactgcattcttccatcttgaaaattttgaatttttctagattttcaatatgtttttggggtaataatgatatgtaatattataaaatttgaagtaataataatgaatgaatgaaattaaataaaatggactccagataccttcacctagagacttatgctgttaattaacttttagagactacaaactcaggtatcagcctgtgcatatatacacatagaaagataatgcataaataggagtgcttttagaacaactagaatataggatgcatactaatttaattaacatcttaaatttaactttacttgaaattaagcataaaaaagaagctgaatataatctaagtggctgaactctagcaacaatttcactgcagaataagttgtttctaaaagatccctctaaagttcataagaaatgattatgaagaaattgaagtttacatcattacttatgtaactaaaaattttcctttaacctctctaattttgttatgaaagacaaagaaattagattaggtgggcttcttttttactttaccatctcagcctctgaatttgttagttatattatttttatatttttgaggcttctgccctgctaggatgctttgtggcaataatttctgaaattcttcaaacttaattttatcagattttataagaaacttagcaattcaattaaaattggaaatgcaaaaagtcttcagttgcataagaaaacccattcatgatagtagaaatgtaaattgtaaccacactgagtttccatttcttacctatcagattgtcaacatttcgaaagtttggcaatacctttattattattattattattattattattattattattattatactttaagttctgggatacatgtgcagaatgtgcaggtttgttacataggtatatatgtcccatggtggtttgctgcacccatcaacccgtcatctgcattaggtatttctcctaatgctatccctcccctagccccccactccccaacaggccctggtgtgtgatgttcccctccctgtgtccacgtgttctcactgttcaacccccacttatgagtgagaacatgtggtgtttggttttctgttcctgtgtaagtttgctgagaatgatggttcccagcttcatccatgtccctgcaaaggacattaactcatccttttaatgttaaggctgtggggaaacaggctttattatgcattgctgggaggagtgtagtttagtgatatctaccaaaactacatgtgcttagcttttgacccaataatttcttttctgggcatttatctttttatatatatctgcatgtgcacaaaaatgatgtgtttacaaggttagtcagctgagctgcttataacattctaacttacaaagaacctaagtgtccatcagtaagggactggttaaataaattatggaacattcatacagtgaaatatttttcagctaatggggagcagaaggaaaaggtagagaagggaaaaagaagagatctctgtattgatttaggaagatttctaaggtatgttgatcggtaaaatgttcatgtccagaaagtgtgtgtaaagagataagattatatttgtttgtgtatatatacatatatttatttattacttattttatatatataaacactttatatataaacactttaaggaaaatgtttaccttgtgtgagaggggacaggagaggaagggcactgggagactggtaactctgtctctttaatttgtttttatttatttatcactaataattacttattacaaaaaagaatgttaaagcattaagtggattcattctgaacagcagtgctttgtctcagactcctcattcatgacttctttaatttgattgactttttggttagctagattttgccgtctagttaattttaaaggaaatgaatgaatgttctgtttcctaaattgctgcatgaatgaggatatctatcaaaattgtgtgtatcaattctcccttgaaaacctttaaaatcttttggtctcacttgttttctacctcaaaacgttgttagtagtattccagtgtcctctggaatgagattgtggcactttcaaaaagtagagtttttcaccctatacttcgcttttgtttcagtgaattttttttgaggtggaaaaggagctcactaaaatggtttatactttctgattttatcccaaagtttggatttctttttgggttatcttttaatgttgcattattttgtggattttagctttctaactttctgttatggaatatactcagggaagtgttttacatctggagagatataattcaaaattttctctatgtgattatttatacatttttcctgagtgtgtgaaataaatttaagaataatctgaagttttgtgtttgttttagttgcatataccttgaaattgatgttaattgatgttgtctttacttttactatattgtttaggttatgaattgtgtgagtattctctaatggagaagtaggctgtttcatgtctttattctatattgactgtgacataagccttgtagagaaagtttttctatgtgcagaatgtacaaaatgtcttgcaaatctctgtgagtttgcccccgtgatgcttgtttcagcatcatgactgaaacaataaaaggaggaacatcatctagtttctctatttgcctgtgataagtccagattctctgagaagcagacatcatcatgggattaaatgtgcaaaaaccttattagagagaaaacctgtgcgagtgaaaaaagggaggcagctgggggcagctgacagagccctcagactgtgatgcacatttgaccctgagtgaaggagagagggagacaaggttggttggaagtgtcctggactggcatgaagtttcaggaaacctgaaggagcatcaaagttcacagttagaggagtcccatatctcctaggaacaggcatgccttaatctctctgttggcagtagtcattgctgggagtgctagatggccccagcctaaatggggtgatggctttcagaactaagcaggctgagcaccttggtcagcagagatccctatagggattcttaccagtacatctttctaaagcttatatgggactcttcttactttacatttgttcttggatgacctcatccactactatgaggtgaattatcacctagtctcagtctgtagtcctgatcactatctttacctggcatgccaagcctattttccaattgccttctgtgtactttgctgccctgcaaaccctcagactcaacaccccatgatgaacttatgatccttcacctcccccagtcccaccctttattcctgtattagtttaccatgtctcctttcttcccctttcccatattgaaaactaggagtcacctgtagctcttcctctccttcacatcaaatatccaaccagccaccatgtcctttgcatgtatctaaagttctaaactctggtgcctcctcccatttctgttatgacagttctaatttggttcatagattcttctttagaatcacatactttaagatggagtttgccactataggtccatcgtctattttttaacagtagtgactggcaggtatctctccacttcctagagttttccttgctgatctcatcctcagccattcttctgcacttagacttgtagaaaaggtccagatctgcaatgtggatgctgttggagtgctggcattttttccttctgcttctcacacggatattatgaatgataaatttttatgatggatgagttcctgacaccagagccagcaattcctactccccatatagtaatacagaaagcatgaaaagtagataactgaatctatgagtgcataggaccactacatatttggtggtggtggtggtggtggtgttatgtgtgactgtgtacatatatgtatgttaaaactagatatgataaaaccttaccactttattgctgtatgaatcagttatttgtgtaaccaacaaccacagaatctctgtggcatgtaacagtggttgttatctctagctctctcatgcgtggcttggctgaggtttggctgatttaggctgggctcacataagcttcacgtcaagctttgtcttaggcattttctgttccaggctcaggatgtgtatgaggctctggtcttcccaacatgtgtttgttgtggggcccaggtttaagagccagcagccatgtgaagaagcttcttttcatagatggcaaaatacaagaaagcaagaccaatggcacaagtacatttgaaatctttccttgtgtactgtccactaacattcctttggccaaagcaagttacatggccaagcccaacatcaaatggtctagtgggaggggctacaaaggaagtagacacagggaaggatgaagtactgggaacaataatgcagttgaacacaattatgatgattgctttccataagaagaaaataaatagaaaaaaaattggggttggttacgtgcaaatgcctttcctgctttatgtttaagtctaattagcagaggagatgcattttcctataaaaattagaaactaaaagaggagcaatgtggattgctagacagaagtatgtttatgacattattatgtgctaattctttcttaagagtggccatcaatttataaacttccacagttcttttggaaacttcctgggaattgtctattttcgtccatgtttgtaatctctgagccatataaagagtgaagtgtattgcgacgttttcactttcaaaactattcttagccaattttgttagggtcttataaaatgtgctaaagagtcaaacgttaacatatcagctttgaatatatcaggatatagaatgtcagaagttaaacttagaattcttacagtattgtgtagcagactgctaaaattagtatatgattgatgacattgtgatttgataggtaattcaaatattttgtaagtgtttcagaggaaaatattgctataaagcaactgatttagaaattgaaatgagaaatgtcccaagaggtgaatagttgtaatatttattcaaaagtaatgttgcctatcctgctcctgataaccactatttcattctctatctctgtacatttgactgtttccttctaggattccgcatataagtgaatcatgcaatcttttttttctgtgtctgtgccagacacagaaaattatgcttatttcacttagcataatggcttccaagtattgtgttcgagatttttgctaagtgaatagctatagctgcttttgccattggagagttgggggatgggtaactatgtgagatagtggatatgataatttgtttgactatagtaactattttaatatatatatatatataaaacataatatcatgttatataccttaaatgtgcacaataaaatgtattttaaaatatggcctaaatgaacatgatgtagggtttcctttattagtattaggaaggattttaattgtgcatgtagatataagacatttccatatgaaatttatataataacaaagatattacacaaggaaaatgggtctctttcacttctacacctgaaatgtaggcggcgacacttttatctagtcatagaaaacacaatgaacttgtggttgaatgtactcaaattttctatcaaattacaaaatttgtcaaaactgtaacacatttatcatccaaattgtcttaagaaacgtgcatatgacaatgtctttaattttcagtcacccaaattttcaacagttgtattattcacagtgagattcatccaacaaatgtatatccatttcaacttggacaattttaagaactgacaactttccatgtatgatatttgtcattctcagaatcccttagaaacctcaacacttaaccatttaccatgtttcaagggaatgtttttccaggaaaaaaaatgcacaagtgtgaaaaagcaggagaaagagaagtgcagttttaatagaatgtccaagatttaaggttatgatatgaaaactaggtagcatgttcttagcaagtcttgaattaatggcaaacttatgacttcattgattttctttaccccatcccctgacatataaatatatgagaaatatagcttccataccaacacctaaagacagatttcttattcaatttctttgagaaactaaattcaatggcagatgacagcaataccagtgtactgcagaagtatgctctgcattcctgtgttttgttcatggtatacattcctaatgccctttttgtgaaacctggttaataattaagcaagtcaggatgtacgaaccacctgaaattctcggataagtagtttcttaatatctctttttgtacttgctattgaaagtatttagagttatttttgcttgattatttacaattttacactttctttataaactaatttttcctaaataccctagtgtgattttaaagtttgaaatgccttaacattctccatcagggacaagttatgttttgtagttagcggcttgatacccacatgtagctctgtgtttatgatggcagagcaaagtgaagattgcagacaattatcttgatggtcaggcctccaggtcagctggctgctgtgtttacagataaagtgagctggacattgggaagtccactggcaacttctgaaatacataatggtctaaattgccttctattctcagggcccaagccacttgctagtgtaagttggctatttaagggcgagcattaactctcgtgggtcaccagggaaccatttaataagtaactagaggcctggagatgttcacgtattcctctaaatgccctggttttgttactggtgcagttcactcaaggtcattctgcagcttcaaatatttaatgtcctttctcaagtgaatgaccgggtccggtggagaagctggctgatttgttatttgtagtcagccagtacatagtaagctaatcaagttcataataattatattctggcaagaaaaagctgattaacagatgtagtaggagtttagagaggctgaaataaatccgagttatgataaaacaacctcattagagaagagtatatacatgcataaggattttgagctgaatacctttatggtttttttgtaacttttacttttgacataatttcttattttttattttttattttttaatttttatgggtacatagtaggtttatatatttatggggtacatgacatgttttgatacgggcatacaatgcgtaatgatcacatcatggagaactgggtattcatcctctgaagcatttatcctttgtagtgatataatttcaaacttacaaacaatttgtaagatcaagacaatgaacaactatacatccttcacacaaattcactgattgtttctcatttttttccatctgctacctcattatatctaccaagatatcaatccacttaatttttttttcctgaaccatttcacggtaagttgcagacaggatagcccttcaccttaaataattcagtgcatatactccaagaacaagaacattttttacgtgaccacagtgcataattatcaaaatcataatggtgcatactactatccagttgtggtgtatgattttaatatgttatatagagagaaacaaaaatgaaaatgaatgactactattccaaaatgcgaacgtgtgagttgcattgggacagattagtatgctctgtaaaggggaaattaagctgacttaattatttaagtcatgtattaagctaaatttcaattatgaaattactggatgatccaaatacatattagatgagggtcagtcacttattcaataactcatttgcctattttagtcaatgctcaggtgtcttgtttttcctaatgacttccaaaggtgatgattactggcacttactcaagcctaactttcacataccacttgtaaagcaggtttgaataaaagatgcaaggaaggttgacttcaatattcagccataactggacctcttggtgtgttggatttctggttttcagtatataattcagtataaatatagttaggatacaataaaaggctgatcaaatatgtctaaaggagagagtcagtatagtaacataagtaatatagacaaggcatactatttgaattttggattttaaaaaatgtcatccttttattcagactttctaatggtgcactattgcagtgataattagcaaggttaaaagcctcttcctgaagactttagggagatgcttgccattagaataatctgtttatacctatctcatgtttgtttttacagcctgtgtttcaaagaatagtattaagtctgatggattttcttgcccgagaagctaatttaaaaaaatcgtattcactaggtgaactgcagactgctaaaaggtgggactaagatgaacactaaagaacaacataaaggacagatatcactcacctgtgaggatttggttagcgatgtgggaggagagccttcctgagtatcttaacatcagtgcttctctgaaggcattggtagattttttttttttttaagaatgcaacatcatctgcaacctgaagtcagttctggaggcaggatgtacctcatccctaagccagttatggaggcaagactgtactcatatcactgtactcacatcatttacaaggagtaaatgctacataagtggcaccagtgtaagtatctaaggattcaggggatggggagatatcttagagacaaatagagcagacttaaggaattggataggtagaaaggagggaagagaataagaaatgatgtaaataaaaatatataactgcagagaagcagataactgttgaggagtggccaaatatggaggggggctaatgtgtgtgtcagggatttccagtttccagttctcatgaaacaggatgggggctaaaggagtggtctctaccatccagttagtagaacaggatgtacataatgagtggatacctttcaaatattcaattacattcaaaattttgctaaaacatttgttcatgcacatcttgccatagtgaagtccagcccaggaatttctgcctttgcatatgaaatgggatataaccagagactgacaaagaacattcaggataaagagaactattaacttgacacgtattttgtaggagatgctgtgggaaaataggcacattcacatattgctggtgggagtgtaaatcattacactacctataggagggcaacttgatgataactatcaaaattacaaatatgccctttgccctgaaagtccagcttctgtaatgtatcttacggaattacttctgtacgatgcataaaaagcagaatattaaatcccaaaccaaatatttgaaaatggaaactggtcaaataaaccctgccagccatagaatactatgcagctgtaaaagaaaaaattttttaaaaaaaaggagaagaaaaagaggaggaggagaaagatgtgctctatgggttgatttggaaatatcccctagaaagaaggcaagaataatcacatttgcatatatttgcataaaggaactagaaggagatataaaaaacagaataaaagtgttttgtagtgggtggaaactggtagatggagacaagggtgggtgtgaaagtcttcactctgtaaaactttttatacttcataatttctgagctgtttctgtactagttaatggaaaaaatgaaaagagaactattgtgttcttataagaatggcaaggactgctaattttctaccctaacatttattctcccaattgttttttattttaaaccagaacattgccctgtagacttaatgtttccagcttctcttgcagctaggtgtggttgaggtcaatgaggtatagtaaatgctgtgtggtatatcttggtactttttaaatggatctgttaagctatgagggtctttctgccttgctttcttctttccaatatagatgtgatgttcagaagctcagcagacatcttggcaatgaggggaccttgatattggaaaccatgtgctaagaggacagagaaagacagacccatgagtcccgggtgatactatggtgccaacatactggctgcttcttggtttctcttatatccaagaaagaaagctctaccctgtgtacatcacacttattttgatctttatggtgttgattaggcattggagtctaatccagtatttgccccaaatgtagaatactgtttttctttaagatcttttctttgcaaactttgcttgggccctctaagcttgtgactttacttcaaatccagttccactttgggttgatataattatggcatgtgaaaagtgtttctggagaatcatgagatgtgactattatctggtaaagtgtgttgcagtccaaagtgccaatggtggaaaaactcccgtaagtgcaccctgtcatttttctttttaatttaggtgtacagctgaatttttaatatttcatatgcagttaaattaaccatacttcttgtgtcaaaataaatatgcagaatctcaatcatggacttaaagatgcagaaacacattgattttaggaaaagtacatgtctcttttattaccacacatataattctggtaaaaattatgatgaataatagagaaaaaatatggaaacatggatgaaatttgttttatagatttgcaggatgcttgctaacatggtggtagggagggctgatgtattttcagtctgacatctgttaatgtgactataataaataaactgtatttactaagtaaacattcaacttttctctcaaaaagatttggtagtaaaagaatatgtcattgtctcattgctggaagcctcatactttttcatattggatggggaagggaattccattagtggtagcacaagtccatctgtcttacattagacatttgtctaaaccaactttgctcactgaaaagcagtgtaataacaccactgaagagagttcttaatagactgaggaagcaaacaaattcaactggtgtttcataatatctaaatttttagacctgagatcatttctttggattcccttctacagattttaatttgcatgcctgatttagcagcctctttccctgctttaagtagaaagtagaaataatattttaaaactaatttttacatctttttttgcattatggagatgggctttcctgtgtgctattagtagaaaatcttttaggaaaataaggaagaaaccatgcagagggacataatttttcaaaaaaggctcagaagatatagcagtttgtctttatgtttttcaagttaagattctcctatagatatattaaacctaatccccaatgagagggtatttggatttggggccactgaggggtgattagggcatgggggcagagccctcataaatgggattagtgcccttggaaaataggcccaagagaactcccttgcccatcagccaggtgaagacacagcaaaaagatggctttctatgaaccagaaaatggccctcatgtagtgtgtctgcatcctcttcatccaacttcccctaacatcttacatgaccatagtccaatttttaaaagcagaaaattaacattggtacaatactgttaagtaaacgagagacctaattcaaacattacccatttggcaactgatggattttttattctagaatcaactcaattttcccacagtgaatttaattgttgtgacgttatttagtcttctgaaatctgtgacagttccttagtctttccttgtctttcacatccttggcacttttaaaaagtattggtcagttactttatgcaatgtctctcagtcttgatttgtatgatgttttctcatgattatattgaggttctgcatttgtattagtcgattctcacactggtgtgaagaaatacctgagactgggtaatttataaagaaaagaggtttaattggctcacagttccgcttggctggggaggcctctggaaacttacaatcatggtgcaaggtacctcttcacagggtggcaggagcgagaatgagagcagagtgaagtggggaaaatctccttttaaaactacaaaatctcatgagaactcactatcaaaagaacagcatgggggaacccgccccatcattcaattgtctccacctggcccctcccttgacacatggggattatgacaactcaaggtgagatctggatggggacacagaaccaaaccatatcagcattcttggcaaaaataccacagaagtgatgctgtgcctttcccagcacattctatcagacagaaaatgatattttgaaataccatttggcagttggctctttgaccaatttacctctaattcaaactctgtatcattattgagcaagcatttagtagcttgaaattgtagctgcatattctccattttgctcacaagtgtatcacatttagaaagaaagatgggattacttttatcaactaatctggtgtttttttctacctctgtagaaatggaaaataaaagctcaacatctgattattgtaggtgttcttactagctgggttaggaaaagggataaagatacatgtgctgcagtgcgtttatagaggcaggtgatggtcaagtattctttgatggtcaagtactccttctgtctaacagcctcaaagaagctccttttctttatatatatatataaaatatatatatttttaattatactttaagttctagggtacatgtgcacaacgtgcaggtttgttacatacgtatacatgtgccatgttggtgtgctgcacccattaacttttcatttacattaggtatatctcctaatgctatccctaccccctcccccaaccccacaacaggccccagtgtgtgatgtcccccttcctgtgtccaagtgttctcattgttcaattcccacctgtgagtgagaacatgcggtgtttggttttttgtccttgagatagtttgctgagaatgatggtttccagcttcatccatgtccctacaaaggacatgaactcatcattttttacggctgcatagtattctatggtgtatatgtgccacattttcttaatcctgtctatcattgttggacatttgggttggttccaagtctttgctattgtgagtagtgccgcaataaacataagtgtacatgtgtctttatagcagcatgatttatattcctttgggtatatacccagtaatgggatggctgggtcaaatggtatttctagttctagatccctgaggaatcgccacactgtcttccacaatgtttgaaccagtcccaccaacagtgtaaaagtgttcctatttctccatatcctctccagcacctgttgtttcctgactttttaatgattgccattctaactggtgtgagatggtatctcattgtggttttgatttgcatttctctgatggccagtgatgatgagcattttttcatgtgtctgttggctgcataaatgtcttcttttgagaggtgtctgttcatatcctttgcccacttgttgatggggttgttttttttcttgtaaatttgtttgagttcattgtagattctggatattagccctttgtcagatgagtagattgcaaaaattttctgccattctgtaggttgcctgttcactctgatagtagtttcttttgctgtgcagaaactctttagtttcattagatcccatttgtcaattttggcttttgttgccattgcttttggtgttttagacatgaagttcttgcccatgcctatgtcctgcatggtattgcctaggttttcttctagggtttttatggttttaggtctaacatttaaatctttaatccatcttgaattaatttttgtttaaggtgtaaggaagggatccagtttcagctttctacatatgcctagccagttttcccagcactatttgttaaatagggaatcttttccccatttcttgtttttgtcaggtttgtcaaagatcagatagttatagatgtgtagtattatttctgagggctctgttctgttccattggtctatatctctattttggtaagagtaccatgctgttttggttactgtagccttgtagtatagtttgaagtcaggtagtgtgatgcctccagctttgttcttttggcttaggattgacttgacaatgcgggctcttttttcgttccatatgaactttaaagtagttttttccaattctgtgaagaaagtcattggtagcttgatggggatggcattgaatctataaattaccttgggcagtatggccattttcacaatattgattcttcctatccatgagcgtggaatgttcttccatttgtttgtgtcctcttttatttcgctgagcagtggtttgtagttctccttgaagaagtccttcacatcccttgtaagttggattcctagctattttctgtagaacctcttctccattcaaggttgcagaagtctgtgacaaccaaggaaaagagacagcaatggggctctcttacctgtgcctaggaagaatcttacctagtatcttcttctgctaggaagagagaacagatgtataggatgaagtatctcaccttttgggatctttttttaaaataatctcagaccatgtaaactccagccatcaagggaaatgtgctgattcccacagaccgtatttcttttcttttttttatattgcctcagaaagagaatgcatggaactgctgctgcttcaaactagatatctgacactagtgctaatggctggtttctcagctaatccacctgtccttcacttctgaagaactgaatgatagtctttgtatttccaactacaattacaaattacatgaagcaagaacaaatttttagttttatgattatgtggtaagcatttcaataaagctccacaaatgatggaaagtgtgaaggagagaaagagggagagagagaaagacacacacacagacagacagacagacacacacacacacacacacggacccattacccattatctggacagaaacatcttaatttgcgggaacattaaaaattttttttctatgtggctatacataattatttataaatctacaattttatttaccaaaagtgtgtgtgtgtgtatagtgtatacttgcttttaataatagatatattttccttgacaatgaacattgagcaaatattatcatttttaaaggctggacagtagccccttctgtggatgatctgtacctgatttaaaaggtctcacattgatggaaatttcgccattgtcggcagcgctgtagtggacatccttgcatgttgattgtgcattctactcagatgtttccctttgggtaaaagcctagaattggaattattaagtcaagtatataaaaaattgagtcttattgcatatagttaaattgtctctcagaataaaactgctccaatttcaacttccaccacgaatgtatgaatgtgcctattgccatgaatgtttgccgaaataaatctttggcaatatcaaaatatatccatgtagcctctattttatttctttattttgaagttgagcctccttgcctaagttatttttcctattatttcaaccttatttggtgatttgttgcttatattttaattagtttgtatgtgagattcttaatgattttatatattaaggatcttaatgatttttcagtaactgcaaataatttttctagtttataacttatcttttaactttatttgcttaaaatattacttctgaaataattaaaaataaactacataatgaagatctttgtacgtactaatatttaatatgtgataatgcaacaagtatttgtgaatattgtaataggtaatatcttaagcatttacaaatgttaacttattttatcctcataaaattatttaaggtgtatcctgatactaagtcgattctacagtgagcatacttaggcacagagaggttgaatatactgcctaagtttacataggaccaagtggagaaactgaattcaaagccaggcaattacctttagagttcttgttcttgccactgcattttataattggttaaaaaaatatttatttattccggatattaattcattgtcactcatttgcattactaatatcttctccctcttggaagtctctcttttaattttgtttatgctatattttgatatacacaagtatgtcatagccattatatgattataataatgtgatcagccttatcaatatttttcttcctgggtattgtttttgcagcatactagaaaatccattgttactcttatgccatgaaataggccttaatattttcttccaaaaatcttgaattttcatttttaacattcagagctttaatctacctggagtcaatttctatgtttggtatgataggaactgaattatacctcttttgttatagaaaatgtgtaccatcagcaatatttatcaatgtaactaactttattaagtccttgaacttcccattttatttctatgtgctttcaaaattttattattacagagaatgaaattgttttattgcctttcaaaattggttattcttgtgtataggaatgctattggagcttagaatattgatctagtaacccagtaaccttgcttaacaatcttttgaattttaatagtttttttctgaagatcctcttggattttctatgtagaaaattcataatctatacatcaccacacacttttccaactgttttaccattttatatttttctcatctccttgaattatcttgggcctctgataaaatactgaataaaagcagtatttatctggatccgtgtattttctctgatcttacagggaaggcttcttgtgttttaatattaagcataatatcagctttagatttgtagaagatatttcttaacagattaagatctgttcccttttatgtctgattcgctgaaggatttagaaaaattatacataggctaagttttgtcaaatgacttctctgcatataataaaataagcttttctcctctgctgcaaacttcttgctaatattttattttgcatctatatttgtaaggcaggcccacctaggattattatttctcagacttttcttgttcaatatcaagataataccacttcatagaataagttagaataattgtcttatttatttgggtttctttagttagttatttaagctttgttatgttcccagttcttctcagccatttactactagtttctgtcttgtgtgttttatttattaaaaaaggacccccctccagcaatagtataaaaataatcacctctgtttttcttatattttgaaatattgtgggtttttttaacctttaaatcttaaatagataacttagaattggcctctccatgtatgtaatcaaaatagggttatacaattcttattttaaagccagaggaaaaaaatccaaaaatttttttagcaaaaacttcaaatggattcttcatgatgacagctggggtgcccaagagaactgctattggtttcaggtttaaaataaacctgaatctctacgtaattcaacattatgatttggtacttaatgcaaaagtaagccttcaactcaacatataactggagaagaaaaatttaattccagaagctttccatctcatataggttattactctgccagagtaaggatttactttctcaagcagttggaattcccaagcatactgaagcaagttatagatagcctgaaaagcaatgtgaaaagcaatgcttcatctctgaagcaaaatttcctttcagctttacaatcaatgatgctatcagtgacatggtttttaaattctcgttgagaaaatttaaaggaaaatgttaactttttaaatgagcagacatgaagaacacagtttacctacaacatgaatgaagaagtatagagttattgcctgtgttgggttttgtagatccttcttgattcctgcttatatttaatagagatgtcagaatgaaaatgtccaacatggttaatattaatcttattcctcagccagtatattcaggaaggcagtatagttattttataatgttgttcttttgtttgtgtattttgttgttgttgttttgagacagtgtctcactctgtcgcccagactggagggcagtggtgccatctctgctcattgcaaactccgcctcctgggttcatgcaattctcatgcctcagccttgtgtggtagctggaattacaggcatgcgccaccatgcccagctaatttttgtaattttagtagtgatggggtttccccatgttggctaggctggtctccagctcctggcttcaagtgatccgcttacctccgcctcccaaagtgctggattacaggcgtcagccactgcgcacagcctataatgttttttttacagcatttatttcttggcttactttttattcctgttaatgttgatattgtaccatttggaaattcagctattttatgtgtacacacatatgtgggcactttctacttagtctgtttctacagtgatatctatctttctgtggatatttatgacagataggcagacattcaaatgcagaatacatcaaggtatttgttggactagataatatcaatatcacatggaataggtttgcttgcttgtttatttaattcaatcgcatatgttgagagtacagtgtgtgccaggcaatgcattgtgttctgggatcccacacagggataaagacctcataatggtgggaggtagatggtttgcctgcaataatcacatcagacaatatgttgactgatagtccagtgtcatcaacaatgtgtcgagggagcacagggatggaaataatttgttttgcagggacttgagggtgaatgtgggagcagagatgaggaagaacacgcagagaaagtagaatttggtctaggccttgaagagagttgtatttcatatgagggggagcgagtcaaaacactgaatcaccagggtactttgcttctttagtgaatgggaaatattatagtgcacgtggcaagtagtgagtagtgattacggagcaggaaagtttaagctggaagagctcagtcattctgggttgtatgcacacacacgcgcacacacacacacacacgtacacacacagaggcagtggcatggaggatcatttggaagctggagaaagtaaaaatcactagagttgaggatacagatgagaatctgagcaatgggagtagtctgaacaataggaacgtgggaccgacataagaaagggatggaattgatgacaaatttaatgtgggaaataaggaagaggaagaagcaaagatgatatggaagggtctagcttgtgtgaccagatggaaagtgactcattaatggaagagtattaggatggagaaattgttttatttttaaaataatttccagtgtagtgatgaaaagaaaaagttactgaattttattttgaacatactgagtttgaggagcctgcttaactatttaggtggaaatgtcactttacctaaggaaaatgagtttgggctctgaaaagagagaagtacatgtcaccaggccgggggtggggtgggggatgattgaagccaagggaggagatgtgcttgttcagggagagatgcacagacaaatcaggttcctgaaaaacagaaacatttaatgcatgatgggagggatctattgtcttgctgaagaatgataagtgagatgcagggagaaaacttggaggacactttattgaaaattaaaggacaaatgtttctggagggaagaggcaacaaaataatagatggagattttttaatacgtgccttagtgttcttgcccttgaattggtacaaccctgaagcacattgcatacagtcttccagaatcccctgcaggattcagccccagttgcccatagtgaaggacttgtactttataacacctttcattgccttccatcccttctctgtctcacttctcaacttccctcttggtgccttctggggtcacctcaggataacctacttgcaaccaaatccttgcatcaggatctacttctgggagacaaaatacctaagacaaaatagaattttggtttctttcttcctaagaatggactggaatgggttagaaggaagatgaactgtggaaagagagagctaagaatgacagggtggggaaataattgaatacgtagtccggtgtcatgagcaatgtgtcaagggagcagagggatggaaataatttgttaaattattaacaactaaataattggagttggaggattaggggcttttcctctctggagaaacacaggaaaagattggagtgaaggcacataatgttagtggtgtgatcattcttgatcattcatcctgtcatttctcatagaaggagacagaattgtttactgaactcaggcatcttcataagcaccctaggtgatatagtttggatgtttgtcctgggctccaatctcgggttgaattgtaatccccagtgctggagatggggcctggtggaaagtgtttggctcatgggggcagatccctcatggcttggtgttgtctttgtggcacctccttccacccaaccttgctcccaccatgtgagatgctggcttccccttttgctttccaccatgattgaaagctccctgaggcttccccagaagccaagcagatgctggcacatgcttcgggtacggcctgcagaaccgtgagccaattaagcctcttttctttataaaatacccagtctcaggtatttctttatagcaatgcaagaacagcctaatacactgggatagtccattcattctaagtctgttgttattcaacaaatatttataaatcatatcctatgtgtcacacctatgattttctgccttaaataatagggttccctttcatcattttttttccttgccacttatttgacaatactggttgcttctgctttctgacattgaattcagttaatcttattctgcttttgccatctgtgataataagttattatcctagaaatatgttttgaatttaaactgaatatccatcttgaagttgccttaaattctttatgataaaatccatttagcataataatccgaaaagacagagtgaaaaaaacattatttaaaatagttgatttaatgttgttatgaaatataacaggactcttgaaaaggtgattaatattcttacacatgttgaaacagaacaatatgagttttttcttatctacttttcttatctggtcttctctggcttctaactttattagcattcgtatattttattaattaaaagtcttcttgatatacattctgtgaaatacttatacaaaaacaaatatcaaacctgaaattcttcaagcttctcgatccagctactgatttattgaaaacactgagaagagaaatgtatgattaaatgatgtaggatgaaatttgtccatactatactataggaagtaggaaaatcttcaggacaatcaatctggtttagtcaacaaataaattccaagaaaaaaataagacagaaggggaaacaatagtttagaacacatacagctcatcttaaacaattccaatgtatggctttcatttagattgggatttttaaaattatggcacttgtgagataatttgaatattgagtatttgatgatatttaggaattactattaatttgctttaggtattttagttatttgcaaaagagggaaactacaccgttagagatacattctgaattatttacaggtataattatatgatatctgggactggattaaagtagaataggggcacgggagaaggggttggggttggataggatgaccacgaatgaatggtttttgaggctggtttatggctttgagtgtgcattatactattaagtttacttttgtgtatattcaaaattatccatgataaaaatggaaaaaattaaattaatatataggtagatcatcctcagtgtatgaataaattatagtttattttttccaataaaaactttgttatgtaatagcatggtttcttaaattcacctgttcgatagaaataaggttaaacaagttcaagaatcaactaacatcctcctacagtaagcttcattgcaaatccagttttgacctttgctcaaagaagagaatgagaaaataacacatttgtgtgtgctcttttcctgacctatgacttgtatagatgttagcacagtggctttggttttaaggtaaacattctttcagcatttctcatccttctcccattttcctgcatttctcatccttctcccaccttcttggtattttaatcatttatgtattgtgaacattttagataagatgtaaaagtcttatatagtgcccctcagttaaatttgcttagtttcagagctgtgggattcaataaaatgagacaggaattatgggtaacctcataaaggagtatgaaggcattgttatcgttgctacctttttgaaggaaatatgccctcactctgacttggaaattaatagtctttcatataataatttgataaatttagtaaaattcatttttggacctgcatctagatttgcttctgccacaactaatgtgaaatataaaataaatacttactatattttagctaacatactttttcattatttttattcctaagaatggtaaatactaagaattatctaaattgctgtgctgaatcatataaatgtatcccaagaaaatatttcaaaaaaagaaaacatgcacaaagatagtcattataaaggataacaaagtcagcagaaaaaaaaaagattgtcattatagtattttcaggactaaaacaattagacatgaatcaaatgataaaaagtttcaaaaagtaaatacataaatcatgatatttcagcaacaggaattattgaagtaccatgagaaataaatttttaaaatgcaacaatatggaaatattgagatgtaaaattagggaaaaatacaaggagaataaaaattgtgccttcactctgatataaatatgtaaaatatgttagtttatagacaaaagactgtaagaggatgttcaaaaatgaagccagatgttgcattatagtgttggtattaaggatgagttatttttcctttaaattctcttctgctgttatatgatatttataaaattttaaaagtgcagaaaacaaaaaaaattctgccatgaaaaactctaattatattgaaaataccatcctacagggaagaaagtgcaagattacttttaagttagctctaataaatacagtgaatgatttgcaatgaactgccacatattttaaagtctagtttatattatacggaacaatgcagagaatctcctctctgtccttcttaaacagaaaggaaaagtgctgttataaatcttacacccttaaagaagcatggcatcactatgaagataagcttcacctaatgtccagtacagtgctggacccaggtgggtacttaccaaacactgtggaaagtctgaagggatgctggtgagtgcctcccagaggtggtattttcttttccattgccccattttgttcctctataatattattttgcttttttaatttttttaagacacgagatcttggtctgtcacccaggctggtgtgaagtggcatgatcacaggtcactgcagcctcaaactcttgggttcaaggaattcttccacctcagactcctgagtagctgaaactagagtcatgcaccacaacgcccaactaattttttaatatttagtagagacaaggtctcactctgttgtccaggctgatctcaaatttctgggctcaagtgatcatcccatctgggccacccaaagcactgggattacaggcatgagccacctgcctggctaagttcttgtttcaataactgcctcctttctcctcctgcagcttttaaattgtagataaatattttcaggtgctaacctagagtcttactcttccatgttcatatggggtatctgcatgctgggggaaggaagaggttgaggagggaattggccttttgctgggggtttagtgcactggaaggcatttttagaacatctggagatttgcttccttttgtcagaatcccaaagactagacagatatttgaaccacaccgtagataactgttttgattttttctttttctctttttttcagagacatcataggtcctattctggggccccagtgaattgttccatagactttaagaaattcttgggctgttggatgggaaggcaaaaccatgtaactggatggagtgattcttaacttatttcttttcactctacagttaagctaaaattagaaactctgaaaagctggctgcttttaaaaggagataatggacacaacctttgagaagggctggtgatggaaggggaagggaggaggcggtcattttcccatacatcaataaaccatagacatgcttggttcattccaccactaggttattgctgctgggaagcaaatattatcctgtctcttgtttatggagtaggtttttttttcaaattaattaaagggtttatcatctcactaaacacacagatgtcttaataaaatgtagagctatgtttagtatcatgcatctgtttcctagatgtcatgtggagtgctcttggaatataaaaatatggtccctgccccaaggagtttgtatatgctttttggtgcacatacacaaacataagaaaatgggcaagtcaaattatagatgaggatgatagtgattttttttcacatttcatgagattattgaatataatttcataaaaatgagaataccctttcagataaaagtgtgcaaaatattttatttatgaatgtaaatttttccatccaaagccactgatcaattagttaagtaaaatagaaagcggaagaaatttttgttctgaatgatattaaaatttttctcagtttttgtcttggctctcttaaaagtaaagattataatcagatagtcaagatggtattaatgtgtttgtttctaaaaatgctttgcaggcagttatctttgaagaggatgattaatagtggtagagataacattaaagaaaaactggttctatggattgtacagatggtcttcaaggggtggccgtcctgaccacaggaactctggctgctattttaattaaacttgagggcagaagaaaagaaactgttttttgttttttttttctaagtaagtaagtattgaggttacacaatgtgtttaacctcggggtttgtcaacaattgtagaaaaactgaacagtttacaagaacaagccagtttgcagtttttcagttcagtaaccaaatgactttcctattgtaagtgaaagtgggaaacagcttttcttagcaaatgtagactttgttcttagaggagttagttattgtcttcaaacaattggtattgtaaaatgtgacttaggaacagaaaagaagtgtgtaatcttatggtaattttattgtgatgtgttacattgttttaaaatgttattttatttccttaaacttatttgtttttctttttttaaattataaaagtagtacttgctggttgaaaatattagatgattttcaattccggcatcataatttctgttgggaaagaagaactaaataatacagaagtatgtgaaacaaaaaggagtttctctcttcattccctgatccacccagtggtcatgcttgtgatcaatttgatatgtcactatatagaacattttattctaagtagaggcaaacatactgacatagaaaatcatcatatataacatgcacaagtgttcatcccagccctgtcctatttaagtgcttttatacactttagccacttcaattttactcactctgttacccatgctagagtgcagtggagcgatcctagctctatataacattgaactgctgggcacaagtgatcctcccaccttagctttccaagcagctaaggccacaggcttgtgccactacacctggctgatttttaactattttgtagagatggggtattattatgttgtccgggcttgtcttgcactcctggcctgagccaccgagcccaactttataaatatttttaatgtgaaaagtgtaactttactggaaatatatctcttaataagataaatgagaccatcttttcaaaaaattatttcatgtgtctggggtgaaaattattattactaaaatgaaataagcattaatatcaatagtatttctctttttctttttcataaatgtacatgctgaaaataatgctcacataaataaatgggtggtaatggaagtctgttttatagtcatgcctctccaatctttgaactcctaagttatatgccaaaaaacatcatcagtgctttgtcaccaaaagccattttattaatctgttgatggaagacttaagtaggcttacctttaaattcattaaatctgagaaattggaaacaacctgacttgtaggaggatttatttaccagcattggagtcttttactttctcaatttggggcaagggatcaaaggatcattctctgtatcagttactttttcacatagcagaatcatgtaaaacttagaaaggttcagaatattggtaatttcagtacacttttgctcatgtaattttttttaaggaaagcttttatctgaagtttatgggtattcaatccttggagttgtagttttaattcattcaattcaattcatgggaaatgttatttacatataatctaattggagaactcagccctcaatgtcagacaaactctgatttcatttcttagttcaagtgaacatgttaatatgtactgcaatgatcttcatttcatttctgaaattttgaattgagatagaagaggcacaaggcttggtgatgtgacactctgctgctgtcaaggtgtcttccaactcattcccatttgtcctcctgggactatccctcaggatggatgcatgcattctcaatagcagggataaagaggcaagattatttaatgaaaactgttagctctaccactgcctcactctataacctgtctgcactctgagcgtgtgtatgatgcagggaaaaccaaagcacctttatatgcttatggtgccttggatggaagaaacttattacatccctttgtttggtgccccagaggattctacttcctgagattatgccccttagcaagattctggttggatgagagacttggctttattttttaagggatgagaaggacaccagtttagggtggataagaaaggagcaggagtagccagcagtgccacagacatctcagacttatcagacttgggaaagttgaaaacctaccggaatttcattcacttaaaactctccacgcccatgtttctcttgaaaaatctttatgtatacttctatctctatttgcataacaccattttagaccatttacatggaagtgtttgttggctactatgagaaaaatgccagtgatgagcatttacaaattttactgaatttggacttttaggttctctacatataattacattcaaatgaagttgtagggatatagattggtctatataaatcttcagagaaaggagaggatgcagaatgatggatattgatgatgaagtaagataggaacatatagactgtgttgttttgagttgccgagattccttaaattttacttagttttgtgttttagagcagaagatgtattcatttcaatttctcttaacatctattgcagttcttttgtgaattatgattggaacagattgcaaaatctcccagtgtatcagttttcctaaaataaatcattaaaagcagttcattatctataaatctttcctgggttaaaataaaaatctgctttctaggtcaatcttcattaagctattaatatccttttcatattataagccttttaatttcttttattagcaactgaaagtagctgaaatatgaatgtcattgttttgaatattaattgatgtttgaattatttttagtaattatgctccgacgtcagtgaacttcattccagcccacccagggacaaggaacttctccaatatatttatatttactgaactgtatttatatttgtatatttgtattttacttcttgtgatagatgttcctagtttctatgatttttattgcagtaaaattcaagaattgtcacaagggtgattcattagtggtacattagaaaagcctgatttttgttttgctttattttcaagcaaatcaaaacttcttcagcataaatacatgagaactcaatttcctaagtctagaacagcatttgaatttttagctcatcatagtaattgttcaattttttccagaattactatctaaccattttgtatgcattttattctaaatacaattgacatcaagaaaatacggtgggtgaaaagagccctggagtaagattctgacaggagacttcctctttctgctctgtgacctttttcaagtaaacatgtctctgagtcactttgttaccatttataaaatgaaatggtttagtcatagtgattcttcttaattgttactgagatttataattttaaaagcaatataaaattagagaaaacacaagccacgtaggcatacaaaacgcaaaagatgaaacatctctacaacttcagaccttggccaaaagcattgttcactgctgatggctgaatgatatacccttgcatgagtatgccattatttatttgcctctcgaaggacatttagagcactttgaagttccagttgcactccacatgcagagactcccaaagaacattctactacatattttagaatttacatgtgaaaatgcagaatcaaagtatgtgaacatttaaattttcaccttcgttaccatgaaagctatatcaaaagttgacattgtagattttttttttctttgcaaatctgtatgaaggaaaacaaagtttcttccttcctgagttctcttcctccactcctgtctttgtgaatggccacttcattcaagcctcttcaggtacctttgagattgcacaccatgtttccttctgagtcttcacaactctattgtctcaaagcttgatggtgacaaaaagtgtgttcactaattcatccaagaattttgggggcctggtgttaccctgaaggctaaagtggtaaacaagagcattatgtttcatagttgcttttgtgaagcttaaggtctagtggatcaagaaaaaaatgtccattagataatggcaggaatgcctgtgcttttccaaaatgcgaagggtgaatacagaaggacatgattcagtctgatggtggctggcagtgaccagggtcttcagggaaaagctcactgggaagtgatcttagctccaaaggtgagtaagaactaattatccaaagtaatgggggtaggaagtgggctgggaggaagagctttgaaatcagagacatacaaaggccctgcagcaggaggtagcagagcaagttagagttgttgaagttataaggcccagtggctgagcccagaacacaaggtgaagtttggtcaaaggtaaagccagaacaggggtcagaataaagcttgctctgttgtgcattttttgttacatctgaaatgcaataagaagccaatgaagaatttaagcaaggtggaaataagggaaatggtggtggtggtggtggtgtgtgtgtgtgtgtcttcataagagtaacatgattaagtttgcattatcacaaattgtcatgaaatataaaaagaatgcttagaatttaaaaattagatcttgcttatcttgtatgacttgtaagcagattgtaagcatgtaagcagattgttcatgattcttttggaggaagttctccccagtaatgcggttactttccagcatttagcaaggaaatacaaataacgtcattttccgacagggcagagagtcctagtctaatttagtgtcacaactagcagttctgttatactttaatccttaaatattagaccaaagcagggacaatagaaaatgtgtttacaaaccctcctgattaaggtgactaaaaagcaaaagcgaaacaaaggaggttgaggtaaagagcagtcttacacgtaagcttccagctttgggactgatttacaaaccacaactgaaatgggtattatatatatgctgatgaaagtagctatgtaacatagtttggatctgtgtcgctgcacaaatctcctgttgaactgtaatccccagtattggaggtggggcctggtggaaggtgatgggatcatggaagcggatttctcatgaatggtttagcgccatcctcttagtgctgtcctcacgacagtgattgacttctcaggagatctgcctatttaaaagtgtggcgcctggctctttctcttttgctcctgctcccaccatgcgagacccctcctccccctttgccttctgccatgattgtaaccttcctgaggcctcctcagaagcagacatctgtgttatgctttctgtaccggctgcagagccaattaaacattttctttataaattaccctgtctcaggtatttcttcatagcaatgcaagaacagcccaataccctgtgtcttcattcattaaaaggctactgaactatgcctactactgcattttgcagacttgcttttcctccatttagaactaatgtcttttatttcaagacctaatgtcacctcattcttttttcatgtgataatatcctctgatgtggcctgcgagttgcccataaggaatcgtggagtttgggatgatagttttgggggtgtgtgctattttgccttcttttttcactctcaaatataaaaaggatctaagtgctactcctgaagttatttgcggggactgtttgcactttcttgcttgaggtgtggctgtggagggcaagacagacaaaagtccaaactaaatggaaaatggtgcagttattgctgaaataggtttcccaccatctaattcctttgtgtgctactggctgaaaaagtccttttccttctcagctccacagctactttttcaggacagagtctgatttacatagacaggctgaatgcagaagctgtgtgtttaccatgtgaatttgaggccactgagaagattattttgttgttctgatctcttgaccttctgaaagctcccatcagacctttctcctcccaccttccaccacactataaataaaagccaacccataagcacccactcagatgtatctgcttcttaaatttcggaatcgatttgttaatctcaaaaggccgtaaaaacctgaaaacttaagtagctaacagagaaaaaaaaaagttcaaacagattcttggaaggctttgaagctaggatgcttggggagcatctttgtagtctgttgagggattagagacggcaacatcatgtcgcctcgcaagccagaggacagctttgaattgcagccaatcagaagccatagtatgtttttggaaggtggtgggggccagttttttcccttcaaatagctgacatttcgcagcccccgtccctcttggagcacgacagccagagagtatgcaatttgtttggaattctctcacaacagtcctagtttgaggctaaggctaggttgtgaacatttagagtttttgtacgtcttgacaaatttgtgttcatcaggtgctccgtgaccatcagtattgttttggttatacagaccaagtgttctgggctcagatccaaaacttgcacaagtaaatcagcctcagaaggcagccttagagatctttgaaaagtgctgaagtagggctaaatattagacaatctgccataatttaagttttatatgtatgtatatatatttatatatatatttaattcacagcagggagcagtacacacatcgtaagagagaaatctactttatgcagagttaattggatgataccctaatttgatgatacccacatcattcagtaattcagttttgcgctttctttctttttatgcttttcatttaaaaagcctatttatatgatgttgaggagtttgttaaaattagctgatattttaggatccttttgacattttatatgattataggacatggggacatgagttcagaaaaattggaaggctctcacagttgaagaactgccatatttgggagtccttggcaaagttttatgtaaactgtatgttttttacttagggagtctttataattgaaagcacccatcatactttgtgcatggacttctattcacagaatgaatttagcaaagctattgggcaatataaaattttaggataggaaaacatagctcaaatgctatggtcattgtggatctcagactgagtacaaggctgcaatattcactcctgaagctagaaacaaacctcaatctgaaaccatgctggaattctgtaattctcttccacaaagctaaagtagaatgtgttgtgttctgttttggtctccacagtttaaagaggacttctaaaacagaggcagagttcagagatgaatttgagtttaaaaatacgattctaagtaaagatagaaagtgggtatggttgagtagaaatagaaacctgatcgtgactcatggtgtccactcaaccaaaggtagtttcctgggaagtagaagatccttcccctcaaaaaggtcagagaaaaggccccacaaatcctcatatttaaagatatcttataagagtacacaaaaatgatatagcataagagggagaaattcagagtatttctcttgctatagatgaacataaaaatatttgacatctgcggtgcctatatagaaactcaagtacatggagctctaagtctattcattatagagcattcagaaccctgggcaaaccaaaaccaaaatagtggtgtcaacccacttctttgacatgccacaactagtggcagatacctcctattctcccccttaccagggacattctcccaaatgtgtcctcttgtgcgtggctcaccactgaggtgctttgtcactcaccttctctatatgatttcagtctgactgtgagtgggtactgtgatgaagcctttgtccacctctcctaaaccttgttttaaacccactttactgaaggtgacatttccccagttattccttattcacatctcctttgtaaaagcatctgaaaccttcacgcagaagccaaagtgtgttacagttctgagtaaagaccccattaaatatgaagattctagggctagtggatctctaaccctaggtgatctctgcaataagtgcagtgaaaccatggggtcagagcctcaggaaatggtagagttgaaggccaagatctgctgattgataacttcacagagaagaaaactcaagaagaaaccaagggactgaatgaagaagaaagaaaagagatgagatggagtaccccatctctccctgaggatggaaggagggaggacagaggaagagcagcacagaggcttccaggtggagagaaaggtgtagctgttcaataatctgatgaaagtgataggaaggaatttgtgagactgtgatatcaatgaccttggacttcttaccaaagtatgaaatgcagtgtgatttttccagtaggatgatgcatagagctgaagatcttgaggaaagttgtaaaggaatggtgctatggtttcagtatgtcctccaaagtttatgtgcattggaaatttaattcccagtgcaacaatggcttttcagaggtgattaggtcatgcatgctctgcccttatgaatgaatcaatgtcattattgcaggagtgggatagttattgcggaagtgggttcctgattaaaaggatgagtctggctcctttactctcttgttcttgctcccagtttcactcttttgcccttccaccttccatcatgggataatgcatcaagcagccccttgccagatgcaggcacttgatcttggacttcccagcctccagaactataagaaacaaaactctgtttattataaattacctagtctgtggtattttattatagcaaccacaacatggactaagacaggtgggctaactattgaactgaatttttggttcacatttattcattcatctatgcaataatattcatgctcttcattatatatccattatatgtgttaggggcatgtgcagtgaacaaggcaaatgtgttccctgttttcattggtggggaatgctcttgcaagtatggtttctaaaagggcagtgttttatcccctgggagagtgttagagatgggagtatctaaaggcgctttggctcttccctgcataatacatatgctcagagttcagataggtcatagagtgaggcagtggtagagctaacagttttcatataacaaacttgcctctttttccccaactagtaagaagcattagtacacagaaaagcgttgattctggagccagactgcctagttcaaatttcagcttccaccgcttaccagctctgtggcttcgggccagtgatttaattcctcagttacctctaatgtacactgggagtaataataatacctacttcacagagctattttgaagattaaataagttagtgtttataaaatgtcttggcacatagtaagcactctatagctattgacaaataaaaataggcccttagacaaaatctagtatgtaaaaggcaacagagagcatgaattagtcggtctcaaggaaggggcaatgctactccctagaaaatatttcagaattttgtgggcattttggttgttccatggattggggaatatggtgggaaagggccagcacattcctgcacaagtttcaaatattctagcagatatttatgcagatgcaaaaaaggcattttaaaatgatctgaactacatataattccaccttatatgtaggtgtgtcagtgttttattgagctgtgaattagaagtttcagagttttattctacactggatttccaggactgtgactgccttctaaattgagggatgatttcctttgttttgttaagaacattaccaagagttactcactatttcagaatgtcactgatacaccaatcctagcatttgaatcccaatgtaatgcacctccatcaatgtgtgacactcattgtggttctccttatttgtacaagcatctcaagacttcactgtgttttctagtgaagctgtaaccaatcactaatatattgagatgcatatgctgttagaataacttgctttccttttacatcttcatatttaaatgagagtattatattgtcttttaagaaatcgtatcagtggctagacagattgcatgatgaatacattttattttcttatacgtatttgttagtggcaatgttgggactgctgtgggtgagaacttctgctacaagcaaaggccctggggcaggtttcagttagagttatagagcctggatagttgttagaaggtgggatgctctctataagggaactactgctctccataaggaaagcatttgttaaatgggcaggaactgtaacctgagggatttagcattgtcttagcttgccaagctctagtttgttgatgtaagatactgacagttctctttaaatctttgtaaacaaggtagaagctcatgtctttctgatagagagtagtcactacacctaaaccaacagctcggatttatgtccaaatctatttacatactcacacaattctagagttaagttcgcttgctcacacaaatgtgttatttgacccatttctcccacaaataaaagttacattattagagggatacataagaatttgaattgttatatgttaaaaacttatttcttcacattgatgcatttgatatattattatttataagtagtacatgtggcccatttaaacaacgtgagggtttcataagtgattttttctttgggttgcaaactattgacaggtggggagtcaaatttgaatatctttgtgctcttgttaactaaaacaatgcctggcatacaataagaatgcaatacatctttgataaatgaatgagcccttatttgtggggtggtggatttgggaatgtaaatggagttaaagttatacattctagattctacttcctgatctgtcacttaactgagttttgaagtttgagaaatgacttaaaatcttggtatcatcatccaaaaactgcgattggtatcacatgcccaggttatgtataacatttttaagatcaaaagagagaagacagataaaaacatttgaaatccacaaagtgctaatcaaatacaggtgtactaaattccacaaaaacaacagaatcagattagggcttattcagagagaaatgatgcattcactaggggtttagttggttgaatagtgttccctgcaaattcacatccacccagaacctcagaatgttaccttatttagaaatatattttttgaagataaaattagttaagatgaggttatattggatcagagtggacccaaaatcctatgtggcatcctgataagaagaggagatgatacatggggagtcacagagaagaaggccatataatggcggaggccgagattggggtgatacagctgcaagccagggaatgccaaggactgccaggagccacagaagctaggaagaggcaaggaaggattcttcgctggagcctagagaaggaacatggccctgctgacaacttgagcttggacttccagcttccagaactgtgagagaataaatgtctgttgttcaaagtcacccagtttgtgacagtttgttatgggggccctaggaaactaatacaagtgttcattattttttcctcttctgaagaaagggacaggatcagaggtgaaataatgcttctggaaatttgcctcgtgtcctggcatcagtacaattggccagacctttatggaaatagaagcagttagcctaaggtttaaaagtactggctttgggacacagatgagattatggtttcatcactggcaacactctgggaagttggaaatcttccacttcccacctgtaaactccaagtgatgatagccatatccagtccattagttgacttgaaggttaaatgaaatattatatgcagcttgaatatatgcatacatatatcttctcaatgttaatgattattactatagactagataacttgaggcaaccatagttcaatttcagatagctctagtttataagactgtgagccaagaacttaaaaaaagaaaggtgacggttttcattttgattcaggactcgatcacctctttgtcagagcatctgaattagcctttgtcatcatgatgatgataaccaaaactggtcaattaacttcacttggctgatttgcattctaattgcaattttttttatatatcttttaagtaactgcaacttttgggcactgtttaataaaaccaagaaattgaaagtgaggagcttgaaaaagtccttgaaccttacaatttctttacagattctatatgtttcacaataaaggcaaggttttaaatctcagttatcatgagaaggctccaggctggctctttgccagtgtgtttaattgagagatgaacacgtcagattcatctctcacacactatcactatcactgtcctctctgagctcaggctgggctcttctgtcccccatcaataaataattcttccttaggtttaaaatctcaaatagcaacctaagtgcattaacaaaatatgtattatataagaaacattcagagaagagaagttcaaggtcaaagctaaaatttacacagagtttcaatatttaaatgggtctgaaaactccatattccatagccctgtacatttacctatactcctcaaacatctctttgcataattacttatgctgaattgaagcaaaaacatcaaaatgtctggaaatttaggtttcactttccattatttttccaagaacttttagtaaatgttttcaaaacagctttaatactatatctcatcatatagaaatcatgcaatcatagaggctcatttacatgcttcttggttccatagtggttgtatgctaattacacctacatactttctgaacctgacaagacagtgtttataatttggcttcaaatgctaatatatattttaaagaaattcagatggaaaatcatctttaaaaacaccttattcacatatttaccacgatcagtgcttgttattaatttctgaagttctgagtttcacttctcttcagcctagcttcctttagcatttgccattgtacagatctgctggagaaaagttctctttattttattctgtttaaaaatgtctctacttttccttcatttctaaatgatattgttttctagatatagaattctggggtaacgtagttgtttcaatacgtttatgatatttgtcaacttattgtgcctgttgttattaatcactcaaattcatagttcatgtctaagtaatattttgtattactctagtggctttcaaaattttctctttacttttggttttcagcacttatactatgatgaatctaaacatgaatttctttgtatttattctacttggtttttgctgagtttcttcagtctgtaaattcatgtctttcaccaaatttggcaaaattttgttcatttcttcaaatatcttgtcccactctctgtcttctcttcttttgggactccaattacatgccgttagacttttttatgttgccctattttacattatttttaataattttgttcaatatttgtcttcaatattgtaatcagatgcaaataaactggctttctcaaccttgattacatcagccttctctgtgaaataaattcaatcctttattacacagtttttttttacaacagctattcaacaaatgtgtatgtcatcctttctgtaaatgtgtcatggtaatagtatttgattagctaaattatcatttcactcatgagtgattacctatgtccataggtctactgcctgtcctaaattgaacagttttgtccacttaaaacaagcaaacttccactgataggtaaatgttccaactttactgtagcttgcagcagtgcctctgttaagtggaattctatttctgccacagcatcaataagctttcctgtgtatgtcccatataaggacctggttgcatttctattatggaagccatagttgccctgctaaggagtcttgccctttcagggaatttgtgcttcagataaactgccaaaacccaggccttctttgaacatttatattgtctcacagctctatttagaacagtctgtaagatcactctgtcctgagtaagacttgaagactcatttttaccatcacattggataataccctgcaagccagccctttggaggaatcaaaattgaacaatcaagcctgaggacttgatagagtctcaactttgactttttagttttttttctctctctcaatctttttctttcttagaaaatagaaaaatgactgcttactactgattgtaatgtgtctcaacttttgaaattcagccttaaacttgttttactgtgcacatttgcttttgttgaattaagtccaggtctcttcatttcccagggcaaaaaatcttggttaaattccatgggaaaggattgtgttttgggtatgtaaacatctatccaaatacttgtagaattcaaaaagagcatacattcttaagagtgactcagttcaaacacatgcgtgcagattaaacgtcttctttaaggaagcatatagttaatagttttaaaaatgaatttccccaacctgattcaaagaactctcattcttccagaataaaatatatcttaacttcaagtgggataattggcctcacccctacagtgcttgcttggcgtctagcaattatgcactagaaagcacaaaagggatagaattaataggtaaattttagtgagatttggcatgtgtgaggttaagggaatttttcaaagttgcttataaagttgcatacagtttcaaattgttttcattttgagttattttggttaaaaacagaaaccacattttaaacaagcagtctgcttaatgtaaaataaacatgtaacttaatttgcacatttgttgggtgcttgttttggaaatcattgtggtaaaatggaaataatcacagaggcttctgagccaggtagatgtggatttgagtcctggcttactaattctgtggcatcgggtaagtttctgagctcttcttagccaccatttctttttctataaattaaaaatgatcgtatctatctttaagggtggattagagggttaacagttcagcacccacagggtttttaataagtactttgaattttgagaatagacaagacctaaacattaaatattttgcttttgactaataacgtctagattattagtctaataacttcaggctgttcatagtgatcttgctgggttgaggcaattgagactacattttgaaatcttttgttttgtgaagtatacaccacacataaaatgcataaaccataaatgttaatgaatttaatagtaatagacacctatgtaatcatcacgcagcatatcagctttaaaaaaaatttttaaagaactttttgatggtattatagcaaagatacagaaaagtgaacaaatcataaagtttataattcaaaataattttcacaaactgaacaacctcataaccattgcctgatcaagaaataagacatttctggcaccatccccccgcccaccacgccacccctagaatctccgtgtgttctttctattcactatccatcctcaccaaggtagaatattctgacttcctctcattagatgagtttcgtctggttttgaacttcatatacacggaatcacagtgtgtactcatttatatcatggcttcttcagctcattatgcttgtggtattcattttttaaccactcattatggaaaatttcaaatgtacacaaaatatgagaaagtatagtgaaccctaatgtgtccatcacttctttaaaaccatccttaactcataaatactttgatctaaacaccgtcttaattctctgctgtccccaaggcaatggattattttccccaaacatcctatcatttcatccatgaatattttagtaagtatctcagcaagaaaaggattctttttgtcacatctacgaacttaacagtaattacatgttttcaatatcctatcttggatcagcatttctccattgtgtcataagggtttttttgttttgttttgtttcttctgttttgtttttttctgcagttggattttttacaatagggtctgaatgaagtgtgaagataccttattttaaatgcctaattgtaaattgggggagagtcccatttatataaactgagtctttgagttctttatggctcatgtgaagaaacaaacatcttgcatattttccaattaaatatgttgaggcttatagtattttagaatattagaattcgagataatcttatagtttcttgatatcttgtgtcttggcatacttggaatcccctctgtgttttgaaagtgaacttttagcttcaccgactttttcacctttggtattatagagtctactttctgctatttttgctctcttgatttacctgccaagtggcaggcacaatgggcaattttagctcagctcatctgaagaaattcatcactgagacctacaaaaattccttgaaaggaacagagaaagccaaggttgttctcactttcagttctcacttttgccagttggatgggacagtgactttaaggatataacaatacagctgacacgattaggtgtttgtttaaatgatttttcatttcaagtttatctttgtttaagctgaccacagcaaatatttgatgttaccagttaaatatcttgcagtcttttcacgtttaaaactttttcagccttaagtttctgccttcttatttgtaacctgtacaagggttttcctctctgtctcttccatcacgggatggtgtctaggcacatggtaagggccatcttgttcttgcagttgtcactggttggttgagggctcttatattgtttaatgtcaagccaggtcttctgtggttattgaaaattaagtgtcttttgcaggtcattctcacacccctgttgatgatcttcactgttgcttcgagccataagcttacctttcactgtgaactctggccccaaccccagacctacttctgtccactaatcctacagcttcccttggtacttgtgcactccctgctgctttctctccactagctgtagtgtgttggaccctgtgaggtcacctttgcctggtcacctccctcacgtttgccatttgactgtgcccaggtcatactgagcacactgccaggaggaaggttgagcttggaggacatgaatgaggagaagctgggggcctatagcaatgattttagaatcattgattcaaagttggatgctttcctcatatcttctgcatttccctgaagaagtttccaggacctctctatctcctttatattataacctcctacttccttctccatggcttgtttcagtcttccagaattgacgcaatgacttcctttaaattaacaggtaatgtgaaatagtctagttgccaaattaaagagaaatgaaaaggagcaagtaaaactaatttttttttttttttgagacgaaatctcactctgtctccctggctggagtgcagtggcgcaatctcggctcactgcaacctccaccctctgagttccagtgattctcctgcatcagcctcccgagtagctgagattacaggcacctgccactgcgtctggctaattttttgtatttttagtagagacagaggttcaccatcttggccaggctggtcttgaactcctgacctcatgatccaccctccttggcctcccaaagtgctgggattacaggcatgagccaccgcgcccggccaagtaaaaccaatttttaaaatatttttatttagcctaaaacatctgaaatgttatcatttcaacatgtaatcaatataaaaatttattgagatattttacattctccttgtcttctttttttgggaaggaatgggtacagagtctggatcccagagtgtgtatttttccctcacaatacaccttagtttggaccagccacattgcaggactagaggctaccatattggacagaatgagtctaggtcatgaatgaggaagcttctagataattttaagagaaaagcaaaaacaataaataaactcttaggatggtgcggctttgcctgtctacattagcatttcattaactccaggtgcttgtttcccactgccacttggtatgtaaaatttgtcttccactcaaccaggcagatttttgatcacagaaattaagcctctggtttcctctcaatccacccaaacacatagcatactgctgacctcacagcaggtactccagccaaccaatccctgaattaaaaactgattacaggcagctgctcgatgccttgccacttcccctctcagtgagtccattttatttgtctgacagcaaagctccaattctgtcttcacccctaccaacccacacttttacaaattgctttttagcttaatgttgaaacagccacgctttaaaaatatcatttcattatgtacaggttggcaatcaagaaagaaaaattcccataggactcaaatgaaacaaatctaaaaatttaggactgaagctcgggaatggtcaatctgattttaatgctctcaagagtccacataaaatatatgggcttagcaaactttctgggaaaacccactcaaagagatgacttattgatgcatggatgaagcaagagtgactcccagattttatccaaaaatatatctaatgatatatgaaaatgatcattctagttaaatatattctaatgatttgaacatatctaaataagttggttctatccctcataaaatctaatgacaaacttcggagacttaaaaagtgtgaaaaataaaagtcgaattctggagggtaaggcaggagaattgcttgaacctgggtgggggaggttgcagtgagctgagattgtgccattgcactccagccctggcgacagaagtgagactctgtctcaaaataaataaataaataagataagataaaataaaataataaaataaagatgaataacaatcggcccatacaatttttaccccagcaagaggatgtttggttaaatggccagcactgattattcatacaagtacccacctccccactatctcatacacccactcagtcaccaacctttatagagcacatctttttaattcccctcaaagctgcactttcctctctgttccttgccatccacctatccgtctggattgctggaatggcctcctgacaagtctccttgccttctctgtgcatccccacccccgcatttgtcctccaggtcagtgtttcaaactctggtttctgttttgtttcgtttctgagactgggtccttcacccaggctggagtgcagtggcatgatcatgatcacagctcactgcagccttgacctccctggcttaagtgattctctcacctcagcctcccacagaatactggaattacagatgtgcaccaccacgccccactaatttttttttgtatttatttatttatctatttgtagagacaaggttcatgttgctcaggctgaactctccacttgtttttcagtttttaattttttaattggcatataataattgtacatatttatgaggtacatagtgagttttgatacatgtctagtgatcaaatcagggtaattagcatatctatcacctcagaagctcacaatttgttttgttgggaacattcaaaatcctgtcttatatatatttgaaaatatatacaatttttgactgcagtcatcctacattgctgtcgaacactagaactcattcctttcatctagctgtaattttgtgtcctttaacaaatccccccatgcaccctccccgctactcttctcaccctctagtagccactgttctattctacttctaagagatcaatgtttgtagcttccgtatgtgaatgagcacaagcagtatttatctttctattcctggagaagagcaggctttttcctgaatacattgctgtccaatattactataaaacataatacacatgaattattagaacaattaaatgagaaaaacccaggcatgcaaaatattaaaaaatatttaaaacattattttaaaaatttaaataattattaatttaaatagactaaaattgctctctcaacttgctctgtaagttcccatatttactctcagtttctgtacttatcttcctgtgagattttaaaacagcttggttcataattcaggtagcactgatatagatccacagtccaatactatagccagtactcacatgcagatgtttaaagttaaatttcaattagtttaacttaaattcattaaaaatgcaattcctccattgcattagccacatttcaggtattcagtagccatgtatggctagtgataactatattggacatcacagatatggaacatttccatcatcgcagaaagttttattgaacagtactgctgtagacccttgctacttacagagtggtccatgagccagcagttcttacttcacatgagagcttgctagaaatgaagaatctgagctgggtgcagtggttcatacctgtaatcccagtactttgggaggccaaggcgggggtgggtcgcttgagcccaggagtttgagaccagcctgggcaacatggtgagagcccatctcataaaataaaataaaataaataaaataaaataaaataaattaaaaataaaataaaaaaaataatttagccagatatggggacacacacttgtagtcccagctacctgggaggctgaggtgggagtatcacttgagcccaggaattcaagcctgcagtgagccatgatcacatcaccacacttcagcctcggcaacagagttgcgacttggcagcaaaaaaaaaaaaaaaaaaaaaaaaaaaaagaaatctgaaaaacagaaaacaaagtaggcctaaacctcttgaaacagaatgtgcaattcaataagtttcttaggtgactcctatgtactttaaaagtagaagccctactctgggatgtttctaggacaatctaaagtccaaatctgatcagactatcctactaatccttttaaattgatacataatatgtgtacatatttgggatacatgtggttatgggatacacctgatcttttggtacatgcttagaatgtgtaataatcaaatcagggtatttaggatagccataaccttcaacatttatcattttttgtgtgtgtgttggaaacatttcaaatctctcctagctattttgaaataaacaatatatacaatgtatcattgttaggtatagtcatcctactgtgctgtccaacattagaatttattccttttatctaactgtatatttgtacccaccactaatctttccatagcttgcaagaccagctctatctaaagtggtaggtattagccacatgtgtttatttcaatttcagctaattaaacttaatttacattaagtttaatgtcaattaaacttaaagtttaaaaatcatttaaagttcaaaaattattttcccagcccgccagtcacatttcaagtactcatttgtcgcatgtggctggtagctactgagttggacagtgtagatacagaacattttcttaactgcaagaagtttgattgcacattgctgatttagactctagtttaacatccagagatctcatcatctagcagaactaccccctgcctacctctcaagcccccaaaccatggtgcaccaggttggcccttgtctctaacacaatgagttacgtaatttagttcctatgcaccatcaccctcattgttcctttaccttgaccactatttttccattcccttctttccattcacctctccataatcttcaactaatctctgtgtcaaaatttacctcatggtcagctgctccagaaagcttttctagaaaccatcccatgctgcaaccctgccacaatttagattgtcccctttcatttcttaggtagaagcctatgtatgcatgtatcacatgcttttgctgttgacttattctctccatttagatcagcatttctcagcctcagcactattgacatttggggccagataagataactctttcttgggaaagtagacagctgtcttgtgagctgtaaaatgtttagtctcattcctaacctctactcactggatgtcagtaacctccccagttgtgaccatcagaaatatatctgcacattgtcaaatgttccctggggagcaaaatcaccaatgcataagaaccactaccttagacctatctgttttctaaggagagcctcttgaggtctgtgagacacttcaaaccacagcatggtacataggtcctgcacacaattggcactatgttggtatacatgctgaatgaatgattgattaggaaatctgttgtcagcaggtgtttcttctttccttgcatcctttgtttcttctttcttttattctgcttctttgcacgcattcccaagtctaagcaacacattcccaagtctaattctatttcatgagtgaacccattgaccaaacaggagagccctgcagggcagtcattgatcataggtgtctcccgtggccagttggtttggttggctgatccacagtagagggatagacaaaattatcaacctcttaaaatgaagactgggactgggaatgaatcagatgtaacagcctccctgtgatgctcagttttattagctattttatatatactgtatatatgtatgtaaaatagctctatcttatgtaactattttatatagcttttagctatgggtcagagtcgccaatctatcatcttttcagccagctgtcaacacatggtttcagaatttggaagaaacctaaaagattatgcattccagcagggcttggtggtgtgcgtctgtagtccctgctattcaggaggccagggtaggaaaattgcttgagcccaggagttcaaggctgtagtgcaccatcatggtgcccgtgaaaagctacagcactccagcctgtccaacatagcaagagcgcatctctttaaaaaagagagagagagagagagagagagaaaagatcatgctttcagattcctcatttttttctacatctggacactttccttaggtcctactccagccatcattagcatcttaagataaagatagaattttgaagttccatcatttataaccaatcaaatgcaaaattataagacagtgatattcttgatttgaaagctgtaaactctgatgtctgctgctctgctcttcactagtaagttccctggcactagagcaatgttataggatggtgacctagtttagctctaccgtatttctcgagccaagtagagaagaactggaagttctctgccatccaggcctgcaacagctttggagtctctcatttgctttgctcttcttctatctggaatcctttcagaagcctgatcccccacttcgtgcattctgaaagtctgggccttatagtatttgtgcttcttgctgggcaccatttctgcccagtgttacctgatatgtctttacacacctagctctaattgtcctaatattggcattctcttgttttggactggaggaaagatggttaagtcctctctcctttcttggtttagcacttcttgcaatgtttttctagatttgacctacctttaatctctgcaggcatggtccaatacccttctagcagctggcgctggcattgcaatgtgaatctgccactatgctatgggctgggctctaagtggaaatatgtatacattttttcactgcaaagaatcagctccctctctcactccaggagatggttgcctcagccctgtcacactcttggtcctaggcagctttcagcttcctctgtaactcaaccatatggccagttagatggattgagagcatgaccaccaaatcacctgggatcctacttatcacaaaaccgtgaagctttgttacagtcatttattcaatcccatcaaatatttatcaaatacctgctctgggatagctccagtggatacagtaagatgtcatattcatcaagctgctggtcatctaatgggaataataatgaagcaaaaacatgattattgtacagtgagaaatggatatacaaagggatatggaacacagataagggggaaatcagagaaagacaataagaatgaatcctttttagtaacagtgtactgtgtgccaggcaaggtgcttgtaatttctatatagtttacatttctatttaaagtctcataaccacttggtgaggcagacaggcattcgaaaatagcggaaaccctctttagaaattgataacttggttaagttgattatttttttctttcctttaccttttcttgaaatataaaatgcagttaaaaaggtacactcttctaaatagtatagctcagtgagtttttacaagatgagcacatccctgtaaccagcagtctgataaccacattaagaaacaggacatttcctgcatcccagaggtcctcacatccccctaactgcaccctcctcccaccaccctgctcccttcctgaattctgctgcctctctacccaaggctaatcttctggctttaacagcatagataagctgtgcctgttttattcttacgtcaatgaaacaaactcatctactctttttgtgtgtccacattttttcactcaacgtggtgtttgtaaaattcatcccacattgttgcatgcgattgtaatcctcattgctgtataatattccattgtgtggatgttccatttattcattctactgttatgggcagttggatagtttcatttttggatcatagttcatagcattgctatgggtattctagtgttcatattttcttgcacacatgtaaaaatttctgcttggtgtgtgtcttagagtgaaactgctgagttataggcatttgtgggattgaaggtggaatgggaaagagacgtatgcaatcagctcacgagctggtgacactgctggtaaaagggagtgcctatacctagctttaatagatattgccaaatggttttccaaaatggtttaaaagtgttgagttttgaggagcatgcaggagttaaccagaaggttaaagtaataataataataacaacaacaataataaaagggagcagggtggagttacagaaatagtgttacagaaatatgcagtgtatgattgtcaaatttggttgttactggttagctgggtgcatgaatttgcaatcctgtcatgtgttcattttgcttattcttccctgaaatttccagccactaatggaatgtaacactttaccctttttgaacttcttccttctcaatgcagtaccacattaaaggtcaactgtgaaatttccacgtcctattaaatactattcctagagctggatataatatttcagaatgctacccctgttccaagacatacgcatactttagtgaacatgaaattctgtgtttgaatatccagatttctttttttgcctctattgtctttgctttgactttgtggatttggcaatggttgataaattgttttagagtagaagatcactagattagaaacagtatttaactaaaaatagacctcttggctgattatcagtgtctcaagagacagtgtgagtgaatttctgtttctttttgccatgatgctaactgtcacccggaatataatgcttactggcttaaccccttttgttttttatattatgtttagaatgtgtatgtctccttgtaagaatccaatttgaggggttcagaaacacatagtgaatatgcctgatgagtagtgatttttcaataatgatttttacatgttatgtctcctcaaagataacaacagagcaccatgttgcctaaattcatgtaacttccttctgggttaaactgtttattggacatttctgaatatatgcaccatatgtggctatctttcaaagtatgtgtctgagatattattcagagccttttccagccatttagagatatatgtggagcttagagagaataaaaatataatgtgcattatttactagtaattcacataaaatattccatttctaaagcatgttgcagaattattctactggtaaattaagattgaagttgtccttagataatagctagcagtataataaaaataccacataatagaaattgattctgaaatgtaagaatgttttattattggaaaatatatccatataattattacttctacagataaaaagaggaaagccacatgatcatactgataaggcaacaaaaagatgtgacaaaattctaataattttaaaaatctcttacaaattagaaatagtaagatgctatcacaaaccaacaacatcatacatgatagtaacattcttgagcatgtctctaaattgggagagagccaaagttattcgtgcacgtccctattattgaacactgcttaataaaatgaattaagcactataaatattagaattgtcattttataacttgcgtatgagatgactgtctaccctgaaaaaacaagatcaactaaaatgttaatcccaaggaagagttcaacacggaaattatttctaaaatacttttataaaatgagaaagttttttatgtccagtaatcaaaagttagtgaagctgacattcaaaacctcaagctcaaatataaaggacctatatttaaaaaaaatcttaaggcgtgtataggattcttgtattaaattgaaactctcaaggcaatccaaagtagttttaaataagtagaagcactatatttctggaaggaataatattttaaagatacatgttctttccaaattaaattactacaaattcagttaaagttaggaaggtgtttttcaaacttggaaaatgactcaagttaatttgaaattttttgaagaaactactaaaaaatgctgagggaattatgccaaccaaaatttcaaatatagtgtaagacaactaatatagcactctattgatatggaaatcaattcatcagtaaaacagaatagaaagttcataaatacactaattactataaaaaataacacaggcacagtgactcacacttgtaatcccagtaatttaggaggctgaggcaagaggatggcttgaggccgggagtttgaaatcagcccagataacatagtgagacccctgtctttacaaaaaattcaaaaaattagctatgggtagtggtgcctgcctgcagttctagctgctcgagaggctaaggcgggaggatcgcttgagcccaggagtttgaggttgcagtaaactataatctcacaactgcactccagcttgggtaacagaacaagaccccatctcaaaatattaattaattaattaatataaaataaaggtactaaatcaattgggtaacacaggattattcaatgagaggcagaaactacaaaaggagagtaaagacaaacttgatagcaccattatttaaaaatacttctacacaaaacaattcacaaatgccaagtccgaaccaaacaaactggaatatttttgcaaaatagatgacattttagaaactttaaatccttattctgtactagcctttataaattaaagaataatagaaatatgggtaaacgatatgaatgggaaagtaaagccccccaaagaaagaaagaaatgcaaacacaaatagatatgagaaagttattaatttcagcaataatcaaagaaatacatactataacaataattattttcacccataaaatttcccttattttcaaaactaaaagttccagtggttgacagtggggaggttaaataccactccaaggtattttgcagataatttacattggttcagcttttctggtagcctttggcatatttatcacaagcatgaaagtcctcaagccctttaattcaaaaattttatttttaatgtattattctaaggaaattataatgaaagtaggcagacattacaaggaaattgcttgtagtactgatcaatagtataacaaattgaaacataaactgtaagtattcagccaaaggaataaattaaataatcataatatatgtcaatagtggaatcgtaggcagacattaagaaagctgttaccaaattaaataatatataaatatgttcatgctctagtgtcaagggaaatatgcagattacaaaggaaaatgaacaataagatcttattttttaaaaagaaaaaatgcccagaagtcatatggacatgcacgaaagtaacagtggttttctctgtcttgtgtgattataaatgattttaatttacttacttgtacttgcctcacatttgcaagtgtttttctacagcaagcatatattacttttataacatcatgataaaaatcatatttcattgtattttacaatggacattttgttttctaaaatcagaaagcagaaatgaaataattataactatatcttaattcagagtttaaaggagaaatctccatttactggtttccccattactacttaattggctaatctagtttttcatttaccctgatgtagacacaaatagaatctgcaatataatcaggcaccaaccatgggattaattagctaactaattacgtaaatgggatcccagttttaacagtcatacctctgcaaaaattgtctttttctttgcaaaaacaatgaagtgtcaacttttaaaaaattaatcctgccaacttcttataaaaagattgtgtaatgtcttggggaaagatttaagatatacaagttaaagatggcctttgaaagacagacagatttgaatttaatatttgactcttttctaagaatttaaaattattctcaaagacgaaaatgaatggtctgaaactcaacgaaatcttttccatgtgagttatgcactcatggtgtccctgtaggagttagagaggtgaataaattgaacgagtaatgatttgtactcttaaacttcctggaaggagaagtggcttggagggtgttggtgggaatagccaaggtatgactgtgatttcaggtaagataatttgaggagctgacaatttacctgcgtggaagtatccagcaggcatttgggaatatgtaattggctcctgaatcagacatgtcagtgaggtgatactcatataggagtcagttacctaaaagtgacagctaaaccttatgaaggcaatgaattccaggttagtgcagagcctctgcacagttccaaacccaggggatgctcttctcattctcttatctgaagttaagctccagggcttatcattcacataaactacattatgaacaatgctgtttccatctctctatcatgccagatgtcatatactagatgaggtctctcagaagagctagacagaagtataaggactcacctttatatatacaaagtgaggaacaagacaatatgtacaaggactcatattaacatatgcaggatgaaaggggaaaaagaggtcagttaattggttttaaaaaaaagatgaaataagacaggctcaaggaaaacggaaagggggcaaaattgcgggaagtgtttggcctgtggtttcaaatgttatagacagacctgaggcaatgataactgagacaagccactgggcctaaaagtatatagaaatgggtaatcttagggatggtggagtccattgagtaaatgggtggctggggggaagacatcagaccccgagaagcagaagctaaggcctggggaggaatggaagactatggacttaagagtgtagcatcattggtcgaaagacttttatttatatttagggagactagagcatgtctttaggtagagcaaaaggaagcaggagagaggggaacactgaaatacaggaaaaagaggggatagttgagtaaacagaaagaaccctaagtgaaagcaggaggagattggagcagtataccaggaccgggatgagccctggaaaagagaaggagcacctatttctcagagctaggatgagactgaggtggacagggaactaacgccttccagaacagaaatatgtggtccgatgagtattgaatgcaacttaaaatctagttggaatgtgatggataagaagagacccaaagtcatcaacaagccttctcatgaactttcagtcattaaccttcctatatagtaaggacagaaatgatgatttaagccatcttaggcaaggcagtgctaacaatatgcttttgtaaagtcaccatccggtgtaaggaataggcaccagcttagtgatgtttgcaaataagccagtggtgggtgtggataaattagagagagtaccaaatgcagtttgaaaagtgttaagttttgtctctagtaaattgcatgtagttttaccaaatagtgcttcagtgttctctttgtgtttcctctttctggtacttaaaaaaaaaaaaaagtaaagtcagttcatgtagctgtgagataaatcttgagaaaaagagtattgaatagggtactgagtttattggttaacacttaggaaagatacgatgcttgataggagatcctttttattaaacacaaagaatagcattttattctatgccttagaattttgtgatagaattggcaacaattcagttcacaaagagccttagcactgtggccactaatgcactgtaaaatgggtttttgttgatgttgatttggaggctgtgttaaatatcttgcccacagctctaaggttttgggtacaaatctataaaactatttcacatttatgctacttccttttaagacgataggtaattcccaatgatttgcttataaatcagttatggtttacaaagcagaccaagagacattcagatttctgaaaacaaattatccatagttttctattaaacatagaactgggaaaagacttagtgattacttagactatgcctctgatttttaaaacgaattgtaattacaaccataatctatgattttttttcatgaaaaaaaacaaaagctgtgtgaatgaggtcagtaacttcctcaacacctctcagtctcccaaacaacaacacaggttaaccgttatcagtttgctgtgaaaccttccaaaattttcatgatattgacacacacacacacacacacgcacacacacacacatttgcttaatatgcagtatttaatgtatgttcaatacatagcatttttttgcattttgctttttatacttagtgatgtatcttagagatttttgcatatcagtatgcctagagctacttcactatttttatttgatgcaaaatatttcatcacatggatgcgccatcatttttttcactttctccttaaatggatatttggcttgttttaattttttttctgttaccaatgatgctggaatgcacacacctccttgtgcataagtattggccttctttgggatacatagggaagcgtaaatgcattttacattttaagtggcattgccaacttatccttcaagatgatagtatagcagccttttaattttagaaattaagaaggttaagaaggtaaggcacagagattttatagcttgccaaatagcataacaatttaggaactagaaatcaaatatcctatttcctttatagatttctagtgtctacatcaaattttttccaaatttataaaagaagaaaataatgtatattaaactagccccatgaaattttgcttcatacttttcctattctttaccagcaaagcaaaaccagttctgattggtcatttaaatcaatgagttgaatacaaacagaagtataattgccaaattatgggttttgggaaactatgatgaacacgagattctttacttgtctgttgtaggttatttttccaggttatgtgatcctgtgatcacatatctgccaacattttcatgttttgggtatttcctaatgtaattgaatttctcctggtttagaaatttatcaacagaatcatctttatttcttcccttgatgtattcccaaatgtaagaaaaatatgcatagtgagttgataaaaagaatgcaagtaatctacttgaaaaattaagcctctactttccaggaaagataattttaatggggtttgggttcattctctatgagtccttctctatcctaatgtcatgttgggtcacaattgtctgatgatcctggctaagcatttggttaacctcattttgggtcctctttctctcttcacatggaggagcacagcacttgaactctctcgtgtttgaggacaactgggctgacatcgagtgaatttttggaaaactattatgtctttgtagtcacttaatgtcagcttgatgttgaagcaaagttctgtaggagtaaaaaaaatacaagaagtgcaatgaaatattaattaggcaccgagtagaggcaaggagctgggctaggcatttttatgtatgttatctaatctatgctcacaagacttacaacccatgttgtaagtcttgttttgtttgatttccgtatcaggaaatggaggctgagaaagagaataacacatcaactagtatacacagaggttctctagctttccctacttctttctaccacccttcctcccacctcagtagaaatcagtgaacactggagcaaagaagtcctcttggaagaagcagagttggagctaagtcccaaaaggtggctgagatttagatgattgaaggaggagggttccacatttaaagagggagagtagtctgtgtaaaggcacagatgaagacaggcatggtacacacatgctttcactgggttaatgtacaagaacagagctctgttcaactggctttgggaagtataattttggaggataaagggcattggcaagaaactcattggggtctcatgataaacagccagatattaggagtcaggagctagaaggactccctgtgtctctccagagaacttagtgtctcttctttctcccttgaccttcctgctacatgtttctgttgttgttgtttttattttttttctctctgcagaatggcttatttgctctacccagcgtgtggtcacatcagctgcagcaaagattccagctactagcatcactaggcctcagtgccagattccacgggccagatgtctatccctggtccactcagctatgatgaggataatgctttcagattcttgtttacctcagcctgggagcaggttcttttatatcatggcacaagcagctcctctaagaaggcaatgattagtatttgaaccacaaggaacaggagaagtgaggggtcaatgtggtcagacttactaaggagtacttaaaggccactgcaaaaccaggcacctgatcctctaattgagaggggaagtttgcaagggaaaggtgtttgatatatggcaagttgaaagggtggagaggctgagcgccagaggtgagctgaaaggtaatggtaacaatagaggcctagggatacattagtcgacttagagagaaaagagaggaatggcaattgctgaggatgcaagaagttaccttgaaagaaggaaaagcaggatttattgactggttataaaggcagcttttagctccagggatagggacaaggttgtgtggctttgggacataaagaaaggagaaggaggaggaacctgaatgtcaggagagacataatgcttctggtttggaaatgtcatctctggttcaattgtgctatgggaataatggccataaggctacaaatggggtgtgcagagtgaattggataagatatgaagctatgttaattggaagttaatgagatgagaagtggggaattttggagaaaaacaggaagtcagtggccagtagcctcaaatctaaatttgcatcgttacgggcatgctatctgtgggtttgtgataggatttcactcagcttccaggtggctaggtcatattatcaggtggtgaaacagttaaaaaatatcacgacctaagataaagttttggtgtttgctggagcacagtaataacagatgagttctgttcggtagggaaaactctagaagcaagcccagcacttctgtggataagactgattctggaacctactttaaagcttgtgctaggcaaatggccgatgattcccaatgcttgccttagactacaaatgcaaagaggaaaaggttaattttctaacacaaatctaaatatttccttcttgtactaataggacctagccattctgtaatgcaggcaacataggtctgaaagaatggttgtattttggccaaaccatgaacttctttttgagaccctgccagttcctggtggaagccaggaaatatatttttaggcgtctataactccggctaagggagctatgtacctcctaatggttgtcatccaatggatataaatagaacctttaaagagacaagccatatgctttgtggtgcttactttatttaactccagatctgatttacaagcactttaattcctaaaaaccactctattttgttcattaagaatatgcaatgcacataggaatgctttgtaacttggctatggaatcagagatcaagaatattttcctccccaaaacttgtgataaggtcaaatgctaaaggcctatagtaattgtttttagctgttctcttagaattgaaaacaaatgttttctaataccaccaaagtggtgtgctgttagtaatgaatctgtatggcataatttcagtttcctcataatttttatgcatgacctcaaaattaaatgtggttctctaattttttaataattgaaagaataggtttttactaattaagatcagatttatactcttttgtatcagagaatgtcatggtgaaaattaatataacaaagtcatactgacatttactttagatcagtgtaaagatatactacatgtccactggaatggcaaaaattgaatgactggcagtaccacatttggcaaagatatagataacgagaactctagtgcattgctggtagcagtgtaaattggctactaccactttggaaaactatttattaatgtttgtctgtgccctacatatatctactgtatcagtctaagataaatgatcatatgtgtccactagaagatggttacaagaataatcatacagtcgtatttgtaatagccccaaactgtgaacaataaattatttatcaacaattggatagataaacaaattgtagtatattcacaaaatagaatactgttcagcaataaaaagaatgaactattaatccatgctacaatatggataaaatttcagaaatgtcatgttaagtggaagaaataggacacaaaagagaaatatgattccttgtatatgaaattcaagaaaggcaaaactaattgaagctggtagacatcagaagagtaacccactctcttcctggggagggtttttccaggaaaggggtgcctgataattttggagatggagatgtctaagtggtgctttcatgagtgtgtacatatgcaaacactcatcccactgtgcacgaaggttagatacttccccatgtatatgctataccgcagtaaaagtatgaaatatatgttttatacctcaaaatgtttcacaacacattattttctcctttccaattccacagagaagagagaggctaagtctagtacaaaaggttggttctgggccaaactggagaggagatgatgcaatggaagtatccaggcaaatacaaagggattttaacttgtctgtgtttattgcaaaaaaggaaatttgttatattgtgaaaatagtaaaatagtgtggcttaggagaggttctattttggagggggggatgtatgacaagtaatatttttatattttatatcatatccaattagatacattgaagaagaaaaaatgtgttttaattttaagcagagtttttacttttaaaatgtttatatgtatataaatatatacccactcttgtaaatagagccttatgcatgcttgtggagcattttggtgcagtcttttttgaaaatgttttccctgtttcttctacctcttttactttacctctctattgtcacaacctatgtgtgtcctacttaatatgtaagctcatataataaggcatacttatcacataaatatgtgtgtatgggtgtatatgtgtacacccacacatactaacattcatagataagtacagctttatttgtctttgtgctataaaaatgatattatagtatgcaaacttccctgcattttgcttttattcacccagtaaaacttcatggaaattcctgtaagtcaacttgtatattatggtggcccagtagtccctgctgtagatatagcataatttacttaagcagttctttgtttataggttttggttgggcaaggtcttttgtgtactacagtgagaaagctttggcctcagaaacagcaatcagagtttgtcacttagatggtctgagcccatgtctcctcatccatcaaagggagataaatttatacttggccactcacaatacagagcaattataagaatcaaaaagactatatgtaagagtgtatgcgtttggtatgatggaaagagcattgccattgttaacaatcaaatttgtttgtgtttagtacttgctgtaggtgaggcactgttctaaggtcttttcatgtatttatttaatatttacaataacgaaatgtggtactgtgtagtattattcttttaactctttccaaatgagggaattaagaaaaaattgaaataattttcacaaaatcagcaggagacctcagattcaaatcctggattttccatttgagtgtctgtgatttttatctaccatgcaatattacttctcaaatatgatgttcaccgtaccttttattttgtacatgagcattcattggtaacatgaaatagggtggtttataggagaatgatctcattacattgccaatcataaaaaatactaaaatttaaaacacaaaagacatgcatcagatagctatttttgtgcaaaagccatcccaaaatgtagtgatttgaaattacaactacatatttaggctctgattatgtgatcatctggtaagggcttagcagcagggttcttctgttgcatctgggctcattcaagcatctatgataagctgctgagtcagctaggttgctttgctctgaagattgacttcagctatgaaaataggggcaattgagccataaagcgcttatcctccagcaggccttttcaggcttatgcacatgtaggggtatggtttcaagagagaatgtagaaacatgcaagaattcttgaggcctgttgttagaactgacacagcatggtttccaccacattttctgttaaagcaagtcacaaagtgatctcaggttcaaccacctgatgggaattactaccaggacacatagcagaaggcaaagaaagaggttgaggaataattgcagctatttcattcagtgtaggaagcaaagcaaaataaattttcttactaccttatttaattcatcccatagagcctggacactgattttttattattactatgtaagtatgtgtgtgcatatgtgtttctgctgagaataccttgtacatagtttttatcttttaatttgcaaatggctggttttcttttctcggggaatttttttctgagatgaggatttgcttcctctgaatgactaagctgaactgaatctttccactctttagagctaccctcatgctcttgaagtccttatgtctgcaatgattttaatctctatttctcaggtagccagaagacaggatattatactgtggttttccacagcagcaggtctgtttggctagataatcaaggtatcaaaactaattctttaatacagatggcttacaatacttgtgaattgcattttccaaggagcactgtcatattctcaatattaccacacttcctacacctttagcatcctctctcaatactatcagttcccaaaacctttgccctattgtgccaagaaaagacatttatcagatgagtaaactgaggcataggaaatatctatcagtttcataaagggttcatcacctgagatgcatgggtttcttatttcttggccctcagccatatgaattatccaatttgattttcagatttctctttttttctttatacagcttaaaatgacatattctctaactcattcattcaacatatcatttcttcttgaaggcctagtgacatagaaatgagggtatctttagaaatcattagaaattttaaatggttaaatgaaggagctttagaaaaccatcttaaattaggagcttagtgaatgttgctttattttttaattcacatatagtaaatgaaaacatgaatttaagaattggccaggctaagattcaaattccagtgccaccatttataaataacatgagtgaacttagacaatttaatacagcacacacacacacatacacgcaaacacacacacacacacacacacacacttttgcctaatacctggaacatagtagtaaatgctcaatatttttttactctcaaaagcaagggcagcataggaaatgaccctctcaagtcagatcaggagtggtgactaaatgacaaaggaccacttgtgcagacgtccttgtgtttcttcatcttagctttagggttttctttcaagtgtccagattgcacctatattacccttgggtaagagccaatgagataatccatacagaatgcctagggcagggtctggaaggagtaagtgctgtataaaattatccttcttcttctttcacttcctctctttcttggggctgaccagctgataaactagtcctctgtcctagattgtgttccccagaaacagaccttgaaatgaggattatgtgcaggggatttattagggaagcatctcaggagagactggcagaggagcaggccaaggaagggaaagaagacacatctgggttccatttcaggtgaagttccagcctcttcatgacctcatagagtactctggaacataaatagcacctcagagtatgtcctgcctggaggcaaggtagcttggcttttacattccttcatccatctgtcactggctatgggccctcctgggtgggctatcacctcccaagcacttccagctctccatagtgttagggcagttgcagtagcaaaagagaaatttctgaagaaggctgctacagatactgctgcagcagtatcttctgttgccatccagattaccatttccattctcagccttctgaagaaggctgcagttggaaataaagcatgtaaaagctgggaatgggagcacagaccctgcaaaagggacagaggtggcaactctggtggcagcagcagtatctgctacgtcctcttgggttttataggcaccagcaaaacacatcttttgttaaaatggtggccttctgacgggaagggcaggtctactactgaggtcaaaattcatgtgttatttttgtaagcagctactaaagcagtatcagtccagagaaacgagtctatctttgaagaccaaatacccaaaagatctgcttcaaccttccccagttaatcttttgccagaagattcacaatctgaatgtggctgtgagtatttgattagagtattagtaggtgaaggaaggtggtatgcaagaatcagctttaatattatccccgtagaagggaataattggtgattagttttcaggctatataggactattcctcctaaatgaatggataagctgagagatttacttctaaagaggtatggtcttttcattttaactcgagattttaggaaagaccaacttaaaaagaaagcaaaggaagtttcaggagatttcagaatttagaaggaattctgaaattctcttctggggaaatgaaatcctaagacttgcatggatatttctgaaaatcaaaatgaaatattttggttgcataaatcgtcaactgtagtttttaactaaggaaatgtaatttaaaaaatccaagtgttcgatttacataagaaatagagttatttaaatagaagatttccaaaacgctgttagtggtctttgacgtctttaaaaaggcatttatatttgtgaaaagatgatctattttaaggtgtaattatttctaatgtgcctcattttggggtctcttgagagattagaaattgctaataagcaattttaaatattttcgaggtaagttaataaaacacttcatcggtaattcatgacttgttatcattctcacattatccttgtgtgggtaaaggcctgtccatcattggaagtaattggaaagaaaactttgcctgaagctacatgagaactggaacccttaaatcatgaatggtggcaagattccaaaattaattatgaagactattggaatgatgtagcatcctttaactcttattgtgatcgacagaaagtatcatagatggacaactcactttccctttgctctgtgcttcctggtgattttaggtcacgtccactctgaaatctgagctgtcattaaagccatgtcttcgtgtctgtctgtctgaagcagcaaagatgagacagtctgtcgctgtgtgtgaccccagtgagccccataagcagaaggccctgagtctcaatttgtttcttttgattactggcagatcactcactgtgccatttctctgatgtgactgagcatattagctgtgccctcccctaattattcatgcttccaatgttacccattcaaaatttatgaccatgaggatggtgggttagaagcctgaggaactgaggctcaagcctgttgccagagatttactgtcattgttttaggtgcaaagtattaacaggcaggccaactcacttcaattcctgacttagtacatttagtggagaattagttgagaatgagtacattttccctgacacagctgcaaaatcaaacacacgaggagttattgaaaaactgggatttaagcttaaacctatcatttctatatctgatgggcgccatcccatatctgtgaaaatctgacattggggaagtgaaatgcaggcttaaaagaatgctttcaaggtgcatagcaaaagcaatcttactcctttagtgtttcccatttaatacttttcaatttttagttagttaattaaggagaaaatcacttaataatcacataacatagattgctactataaatacctgtattgtctatgttacaattttcgcatctattttactttattatttgtaatctgttgggttttgtgaccttgtgctccaaatgattttgcatctgtaaggtggttgggagttagatacccttcatcatatcttttgccatctttgagtggcttttttaacctttccttttaaaaaaaaatcccttaatccacagtctaataaagtaggaaaaacaatcaataaagcatacctacaaaagttccattttaaacttttagtgaacttaagtttactcatagtgcatttaatcttcctttctgtctgtcagttagcaaatatttattaagccccaacaatataacagagacattgctggctgccaggtcagggggcaagagccatgatgcatttcatcttactttgaggctgtcggtctacaaatatttattgagctcccaacaatatgccagggactttgctagctgctgtggattcagagatgaaaagacatagttccttttattcacagaatttacaggagtgatacaaacaaaacaacataggagacataagatatgtactctgattgtcttggtctgttcagactgctattacaacaataccttagactggttaatttataaacattaggaatttattgcttacagttctagaagctgggaagtccaagatcaagggcaccagcagagtcagtgtctggtagtggtctgttctcatagatgagtgcttttaaactgtgtctgcacttgtcagaagtgcaaagggacaaacaggctccctcaagtctgttttgtaaggacactaacctcatttgtgaggggatgtcctcatgacttaatcgcctcccaaaggccctacctcttaatacgatcacagtgggagttaagtttcaacataggaatttggggggaacacaaacattcaagcaacaacagtgatgatggttaggccaagaacggtgcagtcctcaaggagaaaagctttatatctgctagggagagtaaggaaagtagccttggagctgaggcttggtgcacagagaggagtttgccaggcggataagagcaggagaggtctttcaaagcaggggaaacaacatggtcaaaagcatgaagacctgccagagcttccagaatctatcagagactttgagttgttggagaatgaagtataaggcaaggagtgactgcagctgaggcatggttggatgagggtcagattacaaagaaactgtatatgctgttcaaagtggttcctatattttcttcctgctggttattagaagggcatgtgccccttttaggaggcatctgctatggttaagataatagaaaagggaattttcctacaactcagattacatagttgcgagtgagacacattcctaggtccctctccccaaaaagccttcagaattggaacagattttttgatggtgaagtttgtggtgacatcactggtttgctgctctaaaggccactggaattaggaatgcccgtggatgaaagatattttttgccatggacttaggaatctgggtgtgagtattttctcattggtgggtcaagactgacagctgccctctgcaagctctttgaaaaggtaggaagccctgaaggacctaggtgatgctattacttgatggctcaagcagatcttcacaaattcaatacatgaaagataggaagtaagacgtatgagtgatgggggagtgaggttagagtggtacatctatcatagactggatagaaaggaaagaaaagcagaggaggggaggatacacaacttggcaatgtcgagatccagccatccaaacaagcatggaagtccttggtgaagcttgactcccaaggggcattgctttgcatcaggcacctgctagtctctgtatgcaaagacagcatggctcttctagactgtaatgaatagccaccaaaatctcttggatgtgaacctgctgacttcccttgtgaaaactatgcctaaaggtcagtgaatcctgttttggagctgcttagggtcactaacaccaagaaaacttcatacttcacttttctcttatccctgcagaatgctggaatggaagaaaaaaaaagatgaaaagtaggtcatataaattggtaatgcctaattctaatccagtgatctcatatagcattagaataaattagaatacattttgatgaaaatttccattttattaaatagttgcttcgtgcataagcagtgcagctggaccacactgtttctaagattgttttcaataaaatctcattagctcacaaggcaaattgaattctcacttgctttccccatccactgtcccttactcacccctgctgtatatagagcactgagtgtagaatttcgctagccagaccacttactatttgacagagatgtgtatgtagggaacagcattaagctatgccatgacttcctgtcatggctataattagcatcagttcaataggcttgagttaaaatggtttctgtggtgccattatagctttgttttgccttacttatatctaggtgaccacatgttcaggtttttctgggacagtccctttttatgcctgttttctcagtagaaattcttaataatgcccattctcactctctgaagtattccagtttggattaacaataatatggtctcctgtagcaaatactatgagtgttctcatagccctcagacctgagcattccagaatattcttactggcatcagcctgttgatatcatgtgcagagtgctctattgaaacgacagaaactcttggcccactcaccaagctggaattcagaggtattgacttccctaagggcatccttcagccaataactgataggaattggtggtcaaattttatttgttgttgttgtttttccttgttgatgtacagttactctagcactattcacttagaaaatttccttttcctagtccatttcattggcacccttgtcaaaaattaattgattttatatatgtcagtctatctctggactctcttctgatccattgacctacccatataccaatacgagactgacatatttatcctcaggtgactttaatttgccactaggtctgagaatcaccattttcgacaaaccatgatttattgcctggggctaaatgcatttctggtctacatgaatttgtggttttattcacagaggacaggaagaatattgagttgatatctagcagtgtctctcttcacatatatttatttattttcaacttttattttagatacagggagtacatgtgcaggtttgttacctgggaatattgcctaatgatgaggttttgggtacgaatgttcccatcacccaagaactaagcatggtacctgagtttttcaactcctggtccctttcctccctccccactctagtattccccagtttctattgttgctatctttgtgttcaccagtatccaatatttagttcccacttataagcgagaacatgcagtatttggttttctgttcctgcattaatttgctcaagataatggcctccagctgcatctatgttgctgcaaaggacatgatttcgtttcttgttatggctgtgtagtatcccacggtgtacatataccacattttctttatcaaatccacccttgacaggcacctaaattaactccgggactttgctattcacacatatattgaaaacatttatactaaacaatatgtttgttatgaatagtgctatattgtacacatttcagagaaccttttccctgctaaatcttcacgtgactcttggacacattgtctttgtgaccactggagcacattttgaagtcatctagtagacttttccagaacacatatttttcacttatatttatattgtttgaggtgctgcaaacctctttaaattgtgtacaacatttgcaattgttaggttatacccacctgggaataattactaagtctgtgctcatttttgtttaactttctgatatatttgtttcatttaagtaaacctctagaagtatccaaactaggattagtagaggtaattttgggctaatgtatcttccccaaacattgttctgttgttcaaaataaggtaattacgaagacactggtaacatgagtgactttgttaggacttgagtataaatcaggctcctctttcctgaggagtgcttaatcaagaaaaaaaaaggcttttcttcatataaaggcttatgtaatatacaggctaccaatctttggctttgtaacttcgtttgactatagtgcaacctgatatggttgacttattaggttgaattattttataccgctacgaggcactttttgtttaaaataatgtatgcctcttccagaagatccctgcacatcacacattcaaaactaactagattaccaggacatgggaaaatggtgtcatatgtcttagttgctgaaggttcactttatcttgaataataaaattacagatctacctagaattgaacttaattgcacaatattgtatttcctttgccaattaacccaatggaggtttgaagtaatatatttgaaaaatgctttgtaatctgaaaagcaccaggcacttgttaatcgttgtcattactatattggaaaaactacctgtggccacttgcaatggagaaaaaagtcttaacactgagcaaagaacagctcaacccttaggcaagtactttatcatcaaaacattttccgatgaccatgattcacagcagatgtaaactaactccagtgtttttcaaactagtggtcttgacccacgggtaggttatgacatcagtttattggttggacatcagcattttacaaaaatgaacagtgcaatagaacataacagaatatactagaaaatagtaatatcagaggtagtaaggataaatattcttttgagaagatctccatatatatacatatacacaaacacacagatacaaacactggatggaagtagaaaatgttctaattgtgactcattgctcagaaacaaaacagaacaagacaaattcaataacaatgtcattgccctaatccttatttaagatttttaaagaatgttatagttgtccttcagcttagcagttattgtattacttaaggtatgatacaaaatgttaagacttttatatatcatacgcttataattcctgagttcatagagggtctaagattttaccattaatatccttctaataaagcattgcattattgaagacaaccagttagccagttcaagtcaacacatttattaagaattaggaatgtataaaaaatataccaaggaaaataaattaagcttatataattatactttatgttaaatgacagtttaatttcttctatggggtgtaaatatttaataaattgtcgatattcaaaagaccaatacatattttaaaatattctgggggttatttttacatacatcatcatgatccccataatgacgtttcaatcagcgacgaaccacatatatgatggtggtcttataagattataatatcaaatttttcctgtaccttttatatgtttacatatacaaatactttccattgttttgcagttgcctacagagttcgatacagtaacatgctgtatagtttgtagccaaggagcaatgggctataccatatagcctgggtgtgtagtaggctacaccatctaggtttgtgtaaatacactctgcgatgtttgcacaatgaagtcaactaaggacacatttctcagaaattatccccctcattaagtgatgcatgactgtatttcctgtaatagagactgtatctgttaactattgctatataacaaccatcccaaacatagtaacttcaacaacaaccatttacttagtgccaattctatgagttagcagtttaagctggtctatcctgagtggttcttcctggcttccttgtgtgtatggtcagccattctgctaagccactctggttctgagagtcttttggctgtttgcctggggcacttcagttctcctctaccctggtcgtctctaatcctcaacagactaactagcccaggcctgttcaaagggcaaagacagggctccaagacaatggaagaattgaaggcatgttgaggcctaaactggatcaagtacagtgtcactttgaccacatcctgctcgctataggaggtcacaggccagcccagatttaacaggaggggaaaataatctccaattttttgatgggagaaatggcagagtaacaaggcaaaaggtagagaaaaaaataaggaggccattaatggaggccatgaatgcagtcaacttatcagatgctcttctcctccctacccttttcattggagcaatataaagaaatccttcagtcaagtttccataaagaccctctttcctgcttctggctgagctcctactaaaaagaagattaatgtggaaattaatctaatccaggattaagagtagaagacttacttaaactgggcaattttctgtcaatttgattgtaataaatattttgcatttaagagtttactattgctaaaggaaggattgtgttttctctgggagcattgtgaatcttgtgttactgaacaaatgatttcctaaaagggtatgggtaaatggaactgtaaatcaaaccaaattttttattttgagcccgcaatttaaagggatcgttttacatgtgttctgtctccagagatacctctaaaagttctaggttttagatgaacgattccccaaagcaaccttcacctggagaacataattcctatatttagcttaatacttgggccagaaaggctaacatgtcatttacagtttacaggtaagatgaatgtaatctccttagagtagtttcatcaaccaagtctagaaaaatcaggtactagagtgatttttacacaactgtttcttattgaacaaattacaaaattagagaaaatgaaaaagaaaattagaaaggatagacttaaatatctactcatatggtaataattttataagaaaaaaatcaaaatataacatctgtttctacctgcctggcctgtgaattttgtagtctaatataatgagagagataatattacaaaatagttaggatggctgacttcaaagacagactgcttgcgtttgaatttaagcttagttatgtgttacctgtgtgttctacattatttaatctttttacgcctcccagtagaacagggataataatggttcctacgtcacagggtgattgtgagaattccgaaagtcagtatgtgtggaatacacaggccagtgatcaatgcctggtaggcaataaatgttaactctcactgtcaacactacagttggtttctattccaaccttcatgaattttcactgatttttttcacacttgtttaaagttacatgctgtatgcctctgccaggggcctgagagacagagataaaggacaaagacactgttcccaagtagcttgaggtattggatgaataccccccgaccacacacagatgcacagatagtgatgccacttgtaaaagggatataagacttaaaggtcattcagaatgtccatgagactcgtttatttttaaggtgatttctaatatataattttgtgaagcaatatgcattttttaggctgttggctaaaatgcaatgaattacctagatttactcaagtttacactcattccacatgtttttctaaatacagaaatttctcattatgtatggcatgatttttttaaaaagaaacattatatataaagagtacgtgaagcctaagaaaagtggcacattctttactcttgtaatatgccagcatcttattctttatttggtggtttctaattgttccctaaaaatgtaccaaccataatattgactgaattatgccacaaagaaaagaaagtgattatagttctcttcatagatccttggacctcatataaagcattgattgattgtggagcctgcctggagaacaggctgtatcagtgctatagaatctttactactaacttcttagatactcttgatttggtctcattcgtgggtttacatttgctctggaagtggtgagcttagatgatagaaaaacgtttggtatgtgaatttcatacacttgaagaaatagatcttgagttcagtttttccctgcaaagtgctagaccttaaaaatctgatttgcatagactggaattcattgatttaagaagaggaatttattacagattaataataattacttctgaagagaaaatactttgaatttgggattctaatacttatttaaaattggcgataatttcactcttaccaacaaatacactaattctgtttttaaaatttcgattagtgttatttttggcttaatatgcacattgttaagccatgtgggtttttttttctgtttttaaaatttaagtatactttgcacagagtaaaaggtacctgtatgtgtctacagttgtgcgagtcttaacaattctatacattcatgtatccatcaccaaagtcaagatatacgacagttctgtcactggcaacatttccatgcattcttttgtcattaacccctttctccggtctctggcaaccacagatttgtttcctttcccaaaatataaatggaatcatacaatatgtagccttttgagtctggctcttttcatgtagcataacgccttttagatttatccatgtatcagtgattcattctttttcactgatgagtaatattttattggatggatactcacagttcccattccccacttgaaggacatttgtttctagtttttggtaattacaacaaaagccatttaattatgttcttacttgttttggaaaaaatccaataaaatggtaaaataatcactttgtgtgtataggagtagggtgtggcagggaagtctgaatccaaaggtgttactctaagtctctgctggctgggcatggtgggtagtgcctctaattagagcactttgggaggctgaggtaggcggatcacttgatgtcaagacttagagaccagcctgggcaacatggcaaaccctatctctactaaaaatataagaagtagccaggcatggtgacacactcctgtggtcccagctactggggaggctgaggtgggaggatcgcttgagccccaaaggcagaggatggtgtgatccaagatcacaccactgcactccagtctgggtaacaggatgagaccctgtctcaataaataaataatataaagtctccactaaaagcgattatctgttgtctactggtataatcaggcataccagtagatctcagactgtgttcccatttgattaccattgttttgctgcttaaatccaaaatatgccaattttaaaaataattttcacaattagtacattgcatttcatcaatcttaagttttcctctaataaatcatttgaaatacttgggtatctcacagaggatcccgtgttacctggtttggcacacaatcattacattgattttcctgaagttgaatctagtaatttttgggtgtctcacataagcatgtaactttcagactttctctccctaaaaaaggagtgtcacaagaacatattctaaatcagtctatctggatgtgaaaataggactcttcttgtgttcacagtggccaaggaataaagactactacattctttttcttttcatttcttgtttctttttttttcttttttttttcagacagtgttgcccagactggagtgtagttttgagatcatagctcactgcaccctcaaactcctagactcaagcaatcttatagcctcagcctccttatcagctgggactacaggcacacaccgtagcacccagcattttttttttttttttctgttagagacaaggtctttccatagtgcccagactggtctcaaactcctgggctcaagcaattctcccctcctgagcctcccgaaatgctgggattacaggcatgaaccactgcacatggcctaccactacatttcttaatgaaaatcacaaagtaagactgggaagcttggagaggctgagaaagctgagagtgggtcctgtggaggactttagggagagtcaggaatgttgtctgagtcctctcttacacctctagtgcagtgagatggggcctaacaggaccacttgcaggatggcctgtgaccagtgtgggagtattcttagattctgtccaaggtgctgttataagagggacaagcaaatcctagcttagataagctagaatcatctatgcctggtgctaaagagggaataaacaatgagctagagggaagcatagcatgcccatccaaagagctcctaaagaaagagctcttgtgggagcgtggttagcagtgttgttcatgtcatctataacttctatacccaaggcatgtgcattcattctcaagctgctgcgggtaccagttactagaaactcatagctgcccccattctctggccaactgccctgggctgacaggagtcccctttcccagagatgccttgtagtttatgccttccaccaatctggagactgcccatggtcagcgaccgaaaaatgcagaggtataaaagaaagcacggctgccttgcctcaagacctcacagcccttgtgttgcaatccatgctccagaggtctccaagggatcgggtggggactaaatttcatctgaaacaacatgtttgtcaagctccttctactgcccccttctgcttctcttgatcttttagagggttcttctgagagcacttcctcaaaaatcatttgcacaagaatccctgtctcaggctctacatttagggaaccaaacctgatatagggaactctgagaaacgcccccaataaaacattaagaggagagagagagagaaagagaacttcatacacttgccgcgcttagagagcatattgacatgttactactttaacaatcaggtaagaacccctctgcctccccttatctcttcactaagctcctctaagtgccaaaattcatgttagcaaggtagaaaaggagatgtctaactaagctatttagggaaacataccttaaggctattaaactctttccttcctataagattccagctttgcggttgatcttgagccttatgaagagaagctttaacgtgaaatgaacgtgatctttccatgagccattaatggttgaccaggggatctgggagagtataactagaaaatttatggagacttttatctaggagcccaagaataaccaacccacctaatttattgaaggtgacagtggggtagagtgcacgatatctcctgagtcttgcctatttggttacctgttatcctaaaacaattgaaaggacaaaaacataataaatgctgaatcctgacaaatgaagacagaaaacttacttttcttcttaaaccaagaggataagcattgtatttagtattgagattaattctcattgaaataaagtccatcagacacacaagtctccatgtattattggtcatccagacattgagatctaatccatcacaaaagtctctatgagttagacatccaggtagccccacatacatctcagacagggcactcttagctgctttcttcttgatggcagctggggattattccttcccttcattttttgtttttatgtgcgtttttgtttgtttgtttgtttgtttttgagacagagtcttgctctgtcagagtcttgccaggctggagtgcagtggcatgatctcagctaactcactgcaacctccacctcctgagtttaaggatttgcctgtttctcctgcctcagactcacaaatatctgggacaacaggcacatgccaccacgccaggctactttttttttttattgtattttcagtagagacggggtttcaccatgttggtcaggctggtctcgaactcctgacctcaggtgatccacctgccttggcctcccaaagtgctaggattacaggtgtaagccattgcacccggcctttcttcccttcttaacacaaggaaatacccaaatattagagggatgcagcagtggggaatgtataatccatggtgtctttgtttcgtgagaaccccaatgaagaaagagaaacagggagacatagtttagagcatgccgctcagcagaatttagaattgccttcagtcactggaagagtctaggtgtacctggctatttgaaatatatgaatacccagcttcattatctgaatgttttatgctccccaaaatttgagctctcttttcgtacaggctgctataacaaaatatcatagacggagtggcttaaacaacagacagttatttctcaccattccagaggctgggaagtctaagatgaaagtgccaacagatttggttcctggtgaggacctgctttctgacttgcagctgccttcttgctgtgtgttcaactgaccttccttttgtttgtgtatgagggagaaagagaatgagagagagagagaaagattcgtcttcctctttttacaagggctctaactccatcatgagggtccccctctgatgacctaatctaaacctaattacctcacaaaggccccacctctaaatataatcacattggggattaagggcttcaacaaatgaatttgggggaacacataaacattcctaatgcaggacaggcaacatttcagctctgccactgactgcccaaataatcctggacaacttacttaacctctctaagcctcagttttgtcatctgttagatgggaatgaatgagttaatatctatagtaccaaaaaaaaattgtgtctggcacagagtaagtgttcagtaactggtaactgttgattattagcctgggttaaactctggagtagttaagaaatgaggcaatttctcattactagaagaaaaatcaaaatgactgtattaaaaaggagatgctgagcatatcatcaataaaagttttaattggttcaatattatttcagattgtgacattaaacatcactttcaaatgctgaggttatttcctcaaatatgacatcagttgactcaatcccattaggagaaatttgaacgccttcactatgtaacataaaaattgctaattctttccttattatatattataatcatgtgtcacttaatgctggggattcattctgatattgtgtgaacatcagggactgaacttatgcaaacctagatggtagagactactacatacctaaaatatatggcatagcttattgctcctaggtacaaacttgtacagcatattactgtgctgaatactgtaagcaattgtaacataatggtaagtattcatgtatctaaatgtatgtaaacatagaaaaggtacattgaaaatacgatataaaagataaaagaacaatggacctgtataaaacacttaccatgaatggagctcctaggcctggaagttgctctgggtgagttgttgagtgactggtgagtgaatgtgaaggcctaggacattaatgtacactactagagaatttataaacactgtatacttaggctaaaataaatttattttaataaacttttcccctcaataataaattatccaccttagctactttaacttttttactttataaacttttaaattatttaaacttttgactcttgtaagaacactcagcttgaaacacaaacacattgtacaactgtacaaaaatattttatttctttacagacttattctataagtttcttcaatttttaaatatttagtttttactttttaaacttgtttgttaaaaactaagatgcaaacacacacattaacctactcagacagagtcagcatcatcaatatcactatcttccacttccacatcttgtcccactggaaggtctgcaggggcgataatatgcatggaactgtcacctcatatgatagcaatgccttcttctgaaattgccactgaaggacccacctgagactgttttacagttaatttttttctttaattattaggaagagtatactctaaaataataatgaaatgtatagtatagtatagtaaacacataaaccagtaacatagttgtttattatcattatcaagtattatgtactatacataattttatgtactagagttttatacaactagcagcaatatagttttgcttgtaccagcaataccataaacgcatgagtgatgtgttgctctgcaacgttatggcagccatgacatcactaggttataggaattttttcagctctgttataatcttatgggaccactatcatataggcagtctctcatggactgaaatgtcattatggggcacatgactgtgtgtgtgtatgtaggtacacacacatatgttcatctcttatgcctgattttgattctttattaatgtggtgtaagtcaatatttattggcagcaaaggatattttcaccttagcaaatgacagatatgaagtttcattctaaagaattttggtgctttcctcctactgccctggggaaatgtagcaatccatgtaatctgccaacatgtatggttggagatgcattttagggggtcagggagataattaatgaggaaaccttgagagtcctatccctatttctagctcttacctcaaaaggaaattactcgtaagtccaggaaatggctacgctgaaaatacttgtcatttgtctgacactgtacagaattctatgtttaagatcatcagttttagtggcaggtattcttggacttaatcctacctctaccaattacaccagtcattagctgcataattttgaacaatctcaatcttctcctccataaaatgggaacagcagtgtctattccttagagcagttgtgaggattaaatgagtgaatgcatataaaaaaacacttggtcctgaatctgacacatgaaagcactgggatagttgttaccatttgaattgtctaattcagggccttttcattccacaagcgaatggcgaagtaccatttaagacttgccaatgggtgggggaggcatttactatccaaataattatatcactgatcatgtctaactgaacacatttttggctagaagggaacttggataaaatataaaaacagagctttcacaggcatttttgttatttcatttatgctttgaaaaaaatattttggggcacctactattatgggtagctaactgcatctcaaatttatatcttaatgtgttcttgtcctttaatttttattctgcaacatatgaacttcagtaatttctaatttccagaatggtggaacataaatacatgtctccagttcctatcaactttgctaagtcataataatattattaacaaaatcatagtctttttctttaacctagcaacagttacttaacaataaaagcaggtgccaacacagcaggaacagtatttagtgttttgtgagtcattgtttttattatttttaactttttttaccatcaccttaggaaatcatacaaatgtcattgtggaaatcaatcattagagtaaggtggaggactaatttttattgtaaaaataaccatatttacctggatacttatttagaatctaagtaagaatgcctgtcttcttgaatcccttactttatttagtcaaatgctaagttaacttgctgttaaggctttgggttcttctttttcagtcgatgtcagtgttgaggctttgtgtgttggcaatttttagttgtgtatcgattaaccattgctacaataatgctatgtaacaagccatcccagaacttcaggcttacaacacttacttgtagtttctagtaatatggttgcattggttctactgatctgagcatatcccatcagggctcattcacatgcctacactcagctctgtattagcttgttggtttcatttgacttggaggggcaatgatgtggctgggctctcagcagagaagaatgggctctgctccacatggtacctcatcctccaagaggctagcactgggtttttctcaggctagtccagtcataatatcatggcaatcacatagcagcaaaaagaaagcataaatgctcaggcatcatttcttcttgaatcgagtcagctaatatcctgttgcttaaagaaagtctatggccaagccaagagcaagcgtaggagggagctacaaagttatagggcaaacgatgtggctacatggaggctattaattggggtgctaatgaaaccaatctaccacagatggcatggatccactgcatatggaagccaccacctttcaggaagacctccccaactggacttttaaaatagcctttctctccagatgccctacctatcatctcatctgcctgttaagaatgggtacatctgggccgggtgcagtggctcacgcctgtaatcccagcattttgggaggccaaggcgggtggaccacctgaggtcaggagttcgagtccagcctggccaacatggtgaaaccttgtctctactaaaaatacaaaaattagctgggcatggtggcaggcacccataattccagctacttgggatgctgaggcaagaatcgcttgaacctgggaggcggagggtgcaatgagcctagatcgtgccattgtactccagtctgggcaacgagagcgagacttcgtctaaaaaaaaaaaaagggaaaaaaaaagaatgggtacatctgggatgaccgtaccttaaatacaagacatgacctgttaacactgccaaaaagaaatgcttcagtgataccttctaatggtggaggaacatagcttgtcaatactcagcaagcaataatcatgccttaagggttgatgttggctttgtgcccagatccccttgggctggtgattctccagctgctgctagtgttggcttttattagcccccaactgagtcctatggagaactgctcctagcccacggttcacatcccacccactgccttctgcggggtagcctgtctgacacagtgcaaacatcccaaccagttttcctcaagatgggacatctctgtggtataatccatgctccagaactcccttgggtccacgctcagggtggactccagctgaggccacagccttactcagctctgcctcattcactttctgcttccctccttctcctgttcctgagagtcactctcaagaaatcacgggcatcccaatccctgtctcagactctggttttagaaaactcaacctgaaatacatgttacaatgttattttctgtcattttcttttgtttttttaaagcaaaaaaagcatagatttattgaaacaaaagtatactccacagaacgggagcgggcttgagcaagtggctcaggagcccagattacagaattttctggggttcaaatactctctagaggttgcctattggttacttggttacaccctatgtaaataaaggagtggcccatgaccagtttgattggctctaggagaggaccaatcactggctgaagcagagttacaaagttacatatgaagacttggcccacaaccagtctgattggttgtgggacaggaccaatcagaggtactttccatctgtctttattattattattattattattatactttaagttctagggtacatgtgcacaacgtgcaggtttgttacatatgtatacatgtgtcatgttggtgtgctgcacccattaactcatcatttacattaggtatatctcctaatgctatccctcccctctccccccacctcatgaccggccccggtgtgtgatgttccccaccctgtgtccaagtgttctcattgttcaattcccacctataagtgagaacatgcggtgtttggttttttgtccttgtgatagtttgctgagaatgatggtttccagcttcatccatgtccctacaaaggacatgaactcatccttttttatggctgcatagtattccatggtatatatgtgccacattttcttaatccagtctatcattgatggacatttgggctggttccaagtctttgctattgtgaatagtgctgcagtaaacatacgtgtgcatgtgtctttatagcagcatgatttgtaatcttttgggtatatacccagtaatgggatggctggatcaaatggtatttctagttctagatccttgaggaatcaccacactgtcttccacaatggttgaactaatttacagtcccaccaacagtgtaaaagtgttcctatttctccacatcctctccagcacctgttgtttcctgaccttttaatgatcgccattctaactagtgtgacatggtatctcattgtggttttgatttgcatttttctgatggccagtgatgatgagcattttttcatgtgtctgttggctgcataaatgtcttcttttgagaagtgtctgttcatttcctttgcccactttttgatggggttgttttttgtcattttctctatgtattttttttttaattctcaatgccttgaaaaaatagagaaaacttcacagataccaaaatgagattaaattcagacatttatgagatatatttttaaaggccctatttcaaaatattcagtgcacatgtatgtattgaggcagtcttggaggaagggacatcaactttgcttcagagaaaatgaatttatctcctcagtctacctggctctgccacttattgatcctgagaatttatgaagatctttttttaaataatttttttattatgctttaatttctggggtacatgtgcagaatgtgcaggtttgttacataggtatacacgtgccatggtggtttgctgcacccatcaacccgtcatctatattaggtatttctcctaatgctatccctaccccatccccccaacccctgacaggccccggtctgtgatgttcccctccctgtgtccatgtgttctcattgttcaactcccgcttatgagtgagaacatgcagtgtttggtttttcgttcttgtgttagtttgctcaacttgattctctgtattctcatatgcaaaatggtaataataattactattgcaagggattttgttgagaattaagttaaatgagataatgcatgtcaaaggagtttcaagggctacagatatgctatttttacttgtagactgtattttcttataactcagagctttagaaacccgatgcaactacctaatgccagtaaaatggagtcgtaaagtaataaagaaaactgattgtcttgtttcctattttttttgaaaactgattttgttgcttactgtttttatcatttggtcaaaactgaaacgtaagttttgtatctctatccagatacaaagacagatttttggctttcgttacaacagcacagtaagatacaaaaatgttcacttcattttaatgttatattttgacttcctctcctgaatgctacttcaggcatatggcaaaataaactttcaaaattaggaagctctgagaaataaataataatgtaaacattctttatttgtgaaatgtagatcttttcctttaaaaaaaaaaagcctggctaaccttatttaattctactgagctttacaatttgggggtattataatcaggagattgtagattcgagctgaaaaggacacttttcttggtactgcatcagtggtaaaattcacctgtgttttgggttagtccagggttaaattgaaaataatactttttagtatttgtggccagaatgattaccaaacaatctctatcaaaacagccatttcttcttaataaaaataatgttccggagatgttgcatagcactgtgacccagattcacacacttgtgctaagagtacctgtgtgtgcaaagacttctcttgtcatcactttcctaatcacattacattgactttcttcatttctttctcccccacaccctgcccttcaacttgctaagtacacagtgtattttcttcctaaaagactttctttttggttcaaaaatatttttttcaggaatttgaaagattcaagggaaaggaaaagagttagctgacttagattcaagtcaaggttgatgctgattgttatgtaacatgggcatgtaataaatgggaatgcaaatctccaagactgttgatactggacaaggtttggggaattttggacagagattttcatatatgttacagcatcttcagttaatgaggagaaactatatgtgcttagattgatagataagtagattgattaatcagtcaatatactgattaatctgaaaaaaataggaatcacattcttcaaagaaaactcagtgatgagaattcttaagatgaagatcttaagttttcattctttggtatttattctttagtgtgtgtttatcctgctgtctgtgacttaaatccaatgtttcctcttctactttttgaaagtgaatactggtagaagattcttgcttatttctgtcaatagggtttgaaataattaatctgacttgattaaatgcctcagttatatagtagcatttaaaaaattatggagccactgttacataattggcctcaatcccatcttgtaccccttttgctgatagagcaaaacaaacctacgcaaatatggaagaaattacccacagcagttaccaacccccgtgctgcttagaagaatgcattgttgtgcataaactcaggataaaaatactgaacatttttcaaccatggctgtgtgttgatttctgtgccattgtgttttgtttgctattttaaatttttgtctacaatgtttcactgacagtggtagacatcattcccttagatgcttttggtttgcctagaagaaatgtgggaataaaagagatgaggacgattacactttggcttccttcaatttttcttttggcagtttagtctaacctcatcttcttttgttgattttgtaatatgagaatttaaggcattcaatagtaggttatatgattgaaattgttggccatctctacttccatgaagggtgtgtacatacctacctccagtagaatctcaatatcccattgtaattcctgatagaattaagaatccatgctttagaatgaatgaaaaccttaaaaccaggttaaatttattttatggaaaaccatttatattactttaagttcatggttcttatttgttcctctcattgttattactttttgagtctttgatcttaagtggagaaatttctgcagaggctcctcaaagaagtagcacatatataatagctgggtcataagagagcttgatttataaaatgtttgattaatagagaaaagaggcaaggtagagagtcttgtctccagaaacaaagttgtctttaaaagtatgtaaaattaaagcttgaatctcttggaaccaaccaagacagaaataaaattaatattcatgtaggtgtatgggctgaagcatcctacaatccaattacataacagggacaaactaaggtaaccctggtgtaatgtcttgtaaaagaagaagtgaggttatataattagactgcatttatcaagtagcacattccacctacacaggctctgaagaaagaaagaggaagtggggagggaaagatttctaaggaataatgactaagaacagtttgatatgtacgtttgtgtcatcctttcaagattttttttgcttttagtattatgcatagcatcacttaggcgtctaatggcttacagttttgtccttcaaagaccttgatcaagccagtctttggggcaaaaagaagagcttagatatgggtggagggaaagaaaaactggaccctttaagaattgtgtctaaggaaaacggtcaagaacagttaactaagaatatgtttacttggaaagatcattttcatattggtaagtagagttattaggtgaatagagagcatatgttttgtgccttgagaggattagactagggtaatattatcactgttgataatgcagatattgcagtatgttttgttaatccaacaaaggtatcataggaaggtacaaaagatagaaaaaaaatccaagatggtaataaggagctttattatggtgaccagtatacaggaggggcaatggatagggcagaatcattcgaaccaccacctttatggttgtctctgtttcactcgttcagcatcagtccttgtaagatgtttctcagtgctgtgctattaaagttgaaacaacagtaattcctgctgaagaagtatatttagccaattgacctcgagtatacccacattagaaaactacactccaaaccagtttcccaggttgttttctcctattctttccagtgttggagtttgttggaaatgctaaggaaatgtcctcgcaccaaatttatcagatatcagaagtgtagtaccttttgcttgtctcaaacttggggtgatagctgttgattgaagaaataaaaaatattgaagtccctgctaagttaaatgtaattgctgaaatggccaacatttcatgcaatcagtacaatcatgcaatcatacaatcagtacatgaatactctgccatcgttagtgtttttgctccctctgagtgcaaaacatctggtgaggagcatgcagcacatgtatgtatgacttccccattttcagtggatgtactcattcctgacacaaaggagagcaaataaaagtaaagcaatgacaattaaaatgtaccaattccccaaatacagactgatgcaataataagtttaagagacagcaataatgaacaacaaagattgttgaatacatgagaaaatttgtttcaaattctaccctttggagataatcatcattaaagctggatgaactaaattttaacaaggaagttggcgagtaaccaaatctatatttaaaggctttcagcctaccaaatcttgcatgtatgtaaccgtcattttatgacttggcttttcatttcattaatattaaccaacaataacttccttttggctctgatggacttaagtctaaaggtctcgaagttgaaattggaaaaattgagttgctttttatactaatttctgattgctatttttacttcttttatggtagaggctatattttatatatacatcatttggcaacagtaattcacttctaagcttttatggtgcaaaatcaattgccaatttggtgataatataggcaggcactaatagtgctgctttgccacttcaaagcatccagcccgagaaatttcataagcaggaaacctaaccccgctggctgaactgatataaagaactgcctcttatgtgttcccttagatttgaatttttcaaagctcctctggaatattgtatttttggagcaatcacaattttcatttatttcaagaagttgatttcctgtaggcttcaaagatattacagttctgcatggattagttttaaaaaccggagtgagcatatgaattgtttctaaaatgtatggtgtaagtgccatgggcactggtatggaatggatatggattctgatgttccctcttccatataaagtgtacttgggaaaatctgtttcctgatctgtaacattcagacaacaatagttcatagaactaatgactcagaagatgcaaatgtatctccatatgttaatactattgaaagtaataggaagatataggagaaaaaatcatcatactgaaattagtagaagtgatgaatggaggcagaagaaactagctggatattttcagtggaaaaactcattttaaatcatgaataaccactgttagcaactttccatatttgctctcagtattttttaaagcgtgtcattgtttttgcaccacacacacacatttgtgtttgtatgtgtgtcaaatagtgaaaaaaatcacaaaatcagagccccaagtctaccacccagaaacaaccattatttcattggcttaacatcattttaaatatacatgcaattatcaatatagataaaagcatataaaatagttttataaaaactaattatacagatactattttaacatgaagccttaaaatttttgttttaatattgattgcctctctgtgaagcatgagaacgtttgtccccttgtgtgtccctccctctctgcctctgtttggatttttgttacttgtgtcattttttttttacactgtgtatctctaaaacattcatggtgacttgaaccatgatttccatatttcattagtactagcactatatttaaataagatcaatgttctcctgcctcatttgccagggctttgcattcttaaattattcatcttgcttcttctctaaattgtctctatttcatcatcaaggtctatttttttaatatttttaggaagggttcagaagtgtatgtgttttatgagatcttccatgttggccaatgtcagccatttgccttaaaaattaatactttagcataatataatatttttggagtcacatttgtagccattgctccatgggcttctagcactaaatattgctgtgcagaagtctgaggagaacctgttctttccctgcgatgagttatttgcttttcgtgcctggatgcttgaaaaagtcttctctttattttcctctggacaaggatatttttcatagttgttttgcccttttttaaaaatcttgcttcgatgccccttttcaaacattctctcttgtcttttaaagtattggtgacttcttgtctttctttatctgagaacagaatgcttctttttcacaggctttttggtttgagagctgaatatttcacgttctttctgattttcttgagaagggaggctgaagggaatactgatgtcatatatgttctttctagaatttcaggtctattttctctcccgatactttgttaaatgtccggtaccaggtttgctttgcatcagcgtgagtgtgtgtgtgtgtgtgtgtgtgtgtgtgtgtgtgtgtgtgtgaagcggcacatggtcaggcttcattagctttctcaaatcattctgaagcagtggatgaattcttcccttaattcaaagaaattattgtttcctattgtcctcagtgagaagcatctttgctattactcagactagggaaactaccaggacacccattcaacttgtttctttctcaatttgtggttatgaacaagaattctcagtaagtttggactcaaccattgacttggaggaggcatcagtgttaggagtcagtgacttgctctgccctagaaatttctgttattttcttagctgtcagagttactgcattaggtctagctttgtttcttgtatgttcttgttttattttgtttataactgttttgcccatgtttaaatgtattctgtgaagtagtttttatcttctgtcttaacctgaaaatcagtaaagggttttaacctaagcccggaaagttactgctatttcctttgcagatggtgcattgtccctgtgggggagctgtctagagggtataaccaactgtgtgaactaggcctatcagaaggacatttcactgaacacctgctggcttttatttttttactttatcttttgtcagtgtcaagggtattatattttttcctttttttttttcatcaccacttacaagccagataagacagaacattcacacctcactgactttctttttattgggaaatttttatttttcctcttgatttattttttcttgctctgagtaggtttataaaactaaagtgaggaacattcagataagatgcactgtcaagattattctaaaccccagcatctttactattttgaaagcaaaacttaaaacaaaaaagattaattaaaaatgttcttaaaatttgaaggtgttttcctttccaaaatgtatttctgcaggaattcccactgatttgaaagataaaattgtatcagatcaacatctccagttaaaaagctagttttccatgttttatttccaaatgctatcaaggggataaaatttaaactttttttgtgcacacatgttattcacatgtgagaataatgaaacataatattccatttttctgctgtatcctttgctacatgtagagtgctgcttgggaaacctgcctcacagtatggttgtgaggattaaatgtgcaattatatagaaagcacttgataagcacttaatacatattatctgtggctgctgctcctttcattgttatgtcatacaatggaaatttcctcatggatttcttcttttgagtgttctttttttacactgttaactccttaaatgagatttttgcataatatttaaagtacaaattctattggttgtccaaagctctatttgagcttttttccaaaatatgttgttttgtttgataaaatgggatgtaagggaagccaatgggctatgttggagataggcctcgagtgcatcctttgtgcccatcttcagaaattggccctcagcctgaatcaccaagcccagtactgtaaaggattcatatatacaacagcacaaccatagccccgccatgaaatactgctggaattcaggagttggacttctatatccttgattttaatcttaaccccactcttgggtagcttcttcgtcttcttcttttcttcttcttcttcttcttcttcttcttcttcttcttcttcttattattattattattattattattattattgttagagatggagtctcactctgttgccaggctggagtgcagtggcacgatctcggctcactgcagcctccacctcctgggttcaagtgactctcctgcctcaacctcctgagtagctgggactacaggtgcacaccaccaagcccagctaagttttgtatttttagtagagacggggtttacattgcatttctccaatagttcaattccctttgcacacatgaaaattatatgtgaaatcatcgtatatgaggatcccatcataccaagccatgtataaaagagaaggtattttgagcatagcatcctaagtctggattattttaaatgaatagttattgtacttgatgatttatttcaaatttcctctttaaattactgtaaatgtttcacaacataaatgctactctaatatatttcttagatatataaatgctactctaagatatttctatatatataaatgctactctaatatatttcttagatatataaatgctactttaatatatttcttagactcacagttttgacactaagtttgttataagtgcagaatctcagactccaaccccaacccagacatactgaatcagaatttgcattttactgagattccccagaaattcctaagcatgttaatgtttaatattacagaactaatatagttgatactgttaatagggaaagccataacactcaagagaaatatggatttaaaaggcctttaaacatatgagactgaagctctccattcataattttaaaaatcacaatctaaaactacaacccaataccaatgttctcttcatagactggtaaaagtgcaaaggggtgacaatatactgtgggttgtccagaaagagcactagcattgctggaagttgaggaatgcagggggtataatccctagaggtttttggcatatctatcaaaagtgtatgctttaacccaccaatcctacctctgaaaatttatcctccagatatgcttgcaaaatgaaatatgtacagaaatgttcattgcagaattatttgtaaatgggagttgcataagggtcaatgagggactagtgcaataaatgctgcaataaaatattatacagctatacaaaagaattagagcatatccccttatactgattggttaaactcttcaagtacattggtaagggaaaacaaaagcaaggtgcagaaaaatgtgtatgatactgtttttttgtgtgaacaaagaaacaatcatatatataaatatattatataaatatatatttatataatatataaaaatatatatttatataatatataaaaatatatattatatttatataatgcatttatatattatatatttatattatgtatatatatatatttgaattagcctgtatggacatttttaaaacaactttgcagacacacataagaaacaaattaagtatctgtgatacatgtaactgatgaagagcttgccaagacataaatgtaacttctaaaactatataggaaaatgacagataatgcactgggaaaaaagtagacaaagatttttgaccagtctattcataaaagaggatatcaaacagccaataaatgtataaaagtgttcaacatcatgaataataatgcaaattaataccaggagaagctatcactatatgtccatcagctggccaaaattaaattttcttacaatagcaagggcactagggacttggatgcatgctggtagggtgaagattggtgtaaacacttggacaaaaccatgttatgaatatattttctattaaaggtgaacatacacgtgtgttatggctaagcaaccccaattccaggtatgcactgttggaaatatattctcctccaccctaggaaacaggcataagaatgctcttcttaacattattctcagtagcctcagaccagaaataacctaaattaaatatccaccagcagcaaaataaacacgactatacagtgttttttaaaaaaaaaaacaaaacagaaaatagcaagtgttggcaaggatgtagaaaaattagaacttttgtgcattgctggtgggaatgtaaaatggtccagctgctgtggaaaaaagtttatccattcctcaaaaagttaaacatagaatcatcatatgatccagtgttccatacctagatatatttgcaaaagaattgaaagcagggactctaacaaatacttgtatgccagtgttcctagcaaaactattcacaatcaacaaaaactggaaactcaaatgtccatcccagataaatggataagcaaaactatttagccttaaaaaagccatgaaagtctgatatttcctagaagacagatgaagcttggaaacattacactgagtgaagtaagccagtcacaacggacaaatattgtaggattaaaataggcatattcacaaagacagaaagtgagattacaagggactggggagaaggaagaatagggaattattatttaatgagcacagtgtttctgtatgggatgatgaaaaatgttttggaaatagtggtaatggttacacaacattgtgagtctacttaatgccactgaactgtatgcttaaaatggttaaaactgtaaattttgttacatgtactttaccataataaaaaaacaaattatagtatgttcatataaaatagtattatacagtgatggaaatgaatacactataaacgcactccacaggttgaatctctcaaatataatgttgagtgaagaaagtcatatacaaaataatacataaaattaattgtatgtaagttcacttacataaagggcacacaggcacaactaaactatgatgtatcgggatgcaactatcaggatgaagtaaaaagaaaagtaagaaaggaactgccctagaaggcaggttagtggttatctttggtgaggagcagatgaggcgtctttggggtgctggcagtgttccatctcttgatctgggtattcacttcataatgatttgtttagctgtacatttcttaatgcattttacatatgtgtgttacatatcacaataaaatgttatttaggcagggcatggtggctcacgcctgtaatcccaacactttcagaggctgaggcgggcggatcacctgaggtcaggagttcgagaccagcctggccaacatggtgaaaccccgtctctattaaaaatacaaaaattagctgggcttggtggcaggagcctgtaatcccagctacttgggaggctgaggcaggaggattgcttgaacctggaggcagaggttgcattgagcagaggtcacacaattgcactccaacctgggcaacaagagcgaaactctgtctcaaaaaaaaaaaaaaagttttttaaaaagaagtgaaaaaaggggttatgtgttgaggttggtaatacaagaactgcatggtgtgggcatgattctcttaactctactattttctatttgggtttttaactgtaaggcttatgtcatttaattttttcaattcaaataactaaaccagtaaactacaaaatgacctggatcaaatgactgcaagaaattttgattctacatatttaaacaatatagccttccaggaaatgtaaatacttgttttatataaatataaaaacaagtgtcttaaatataagtattgaatttgatttgtcttcagaatccaacattcagtactaagttccactttgaaaccctgttttttgacataggttattaaatattaagcatttaattattacaaattaaaaggaaaatataaaggaggatggatttgtttgtttctttttcagattgaaactgcttggccaaggcctagccagggtagctggcctacccatggcaaggacttgcagcaagccaaattaacttccttgtttggatcacacattaaatttcggaataaagccatttccctggaaaggatcaggaagcattaagcagtagtgctcaagaagattaaacttccatgttgagaatctcactggttatctttggccttctggatagctagttcttttctggcctgtgtacctttctatggctacataaaaaaattaataacctttctaaaagtaaaaatcctatttggagtaagatggcattgcaaattaaataagtattggaataaacaacattagcatatttttttcaaagctatgtgtttagcactcaaaacaatgtcatgttgggcatctataaaacagcttatcaacatttgcagttggcaaataggtgtgttttggagatgttatgagcccttcttttaaaatcactaagatttcttattagtgtaaagaaacatcatgtaagtaaacccagagctctttttaatacatttttttctgttttctcttgtgctactgttttatttttttaaaaccttcttaacatagatgtcatggactctgttcataattcagcagcaaagatcagatttttttttaagttcatagaaattgaagctgtttgtttactagatccccttaaactttgagactcatttttaccaataaatctttacacactaaagaacaacgatctatataaatagttcaattaggtagcctttctctctgctccttaatctgtttccaaagagactttgtaactttggcttagaacttgcatgaagatgttttctagtgttattttcttggtatggttgcattgccttttacttttttttggttttaaagtaacacataattcctgacacacttatcattcaacacataagtgcttctatttagatgtctactttcattttattttttaacattgtactgtaaaaagacaaaacatacctactacaacaacagggattgttctaaatgctgtctacctactaactcaattgtagggaggtttgattttccattttatttgtgtgcacttctaatatacttggcaactccctatcatattcattaaagaaaaaactttagataaactatcataggaaaatctaaactgaaatatttaaaaaaaaattttaaatcagccttatttatttacatgcatatacaaatacacacaaacatgttaaaatgctcaaattatccattttacattccatacctcataactattatatacatttagtattaccatgtactatatgtttgtatgtagtgcagtttatccaacagcataagtcataccttctgggaagatgaggtgtatgtcaagcattggtgttctactgcctgccagttttagtttttaataaaaacaagagaatcacaaagatgaaacagaagcaatccaaagtgtataaatcatgcttctttcccttatgatcctattcttgacttttattacctcattggaggacaaggttatacatctcactgttaatcctgggctaggtcacctgttgagtaaaagaaaagcctttggttctcagattttaagtcatctgacattttaaatttgcatttggagacaataaaggaatataaccaactttttctgtttctttagatcttgaaaaggaagttgtttgaagtcaattctttgttttgatgtttggtcaataatgaaataatcttcattttatgttatatccggcaaagaaaaacagtaacagcaatatggagccaggatgtaaatagattgtattgcttgaaatccacttgggtaaaaaataagcatgcaaagcaagggaaaataatcaatcaaaggggttggtagatgtttttcttggttgtggctttttgggtggctttttggactataagccaaagttggatcttgtcccaactgcttttaattaaactcctacttctttttcttttaatactattttttctcataaaattaataagggatcatggtaggacttttggaaagtatgagtattaattaggatatgggtctagctactctaacagacatccaagtgtcttatgattagagtttatttctactctgagataattaggcaagagctgacgtggttctccgtggtgttcaggactcctaacctggactccctccatattgttgctatgctgctgtcctccaacattgcttccacctcctgatctaagatggctgcttcagctccagacttcacagtcaccttccagtaagaaggagaacagaggaaaggatactctggacattcccagaagtgacacatattatctccatttaaaattcattagtctgtgctcagccacaacagaaaactgggaagtttcatcttaattctagttaatcctatgcccatgtaaaattggtggttctacagaaagaaaagaagactggttattgggagagagctagcaatctttcccagaatgcaaaaaagtataaagaagaaaataactattacccataaattcaaaacctaaagatactgttacctttaatttttggcatagttcatttcattactttactgcattacatatttttaaaaagaattatactatatattataatatgctttttctttttttaataataaatgctctaacattctaacagtctttaaaactttattttaatggctgcatagtatcatatacttataataaataaataaaataaatcaatcaataaataaaataaaaaaattatttttcagttctctaagatatgtaacttataggtcaaaatactcactttaaagtttttatttttcatattacctctcaaaaaggtggtgtaaaattatactcccacagtcatatttgagtactcactgcatcaaatatttctcactactaaatagtacaaattttaagatgattactcatttaatagttaacaaatggcctcttattgttttgatatctatttctttgtgaacaacatagaatctttgaaaaaacaattcttggtaatttgtctatctggtttaaattttctctatatgaccgttatctgtttttctacttataaatttatgaaaactctttcaataatatggatacaacttatctttaaccatggtgaaatattttcccaggtttgagttagtcttttctttcaatatttatattcttggaaatttgttctgttacaatatttagaataaatatttatttgtatctagtaagcaatcaataaatgttaatttaataagggattgaaagagtgaataattagatttattaccacattgtattactcttaatgcttactgctagtcttttcttcttttaactaggtctcccccttttggatgcttttcattttggttttcatcttgaatgactagaacatatattttagcaatacttttgagatgcatatatgcttcatatacacatgcatttcaaaatatccttctattgactttacccaaggacttgggtgattgtatagaattcattaatcctgttttccttcaaaactctgtataccttttcctaccttctggtatgtgacataacgtgtaagagtggcctgagttttatttctttgtaagaaattattggccaagcacagtggctcatgcctgtgatcccagagccttgggaggctgaggtaggaggatctcttgagtgcagaagttccagaccagcctagacaacatagcaagactctgtctctgcaaaaagaaaagaaaagaaattattgctcttttggttttatcgtcctggcagttctaaggtactttttctctcctcttgaaattgccccccaaaattagctcaatataatatgagtgcacattgataacatttcataacttcccctgggaatatcaagaattatattaaatagacagatctggaaatgtttccttccactttgcccttaattcttatttctcttgggtctgcttggcctcttcctctggaacatcagtttatactacttgagtttgcttttcatatatgttgtcttctttcttagtctaagaatctgtttgtcttttgtgcctcttcattctgggagaatttaaagggtttgttcctgtaccagtggtttgctttttctgatctgacatttatgtgctcgttttctaataaagattttaatattgttatggtatttttatttctcagtgttatgttagcctaccctgttcttgttttgtttctgcatgtgtctagctcctgttttatctcattctctggcatttttgtctcattgtttatagagttattgtttcaaggaattttattgatcctataaaccagatgcttcacttgtgtttgctctagtaaatattttcccaaatgtatgctccttctcttcgttttgcttttatatatatatatttctatacatataaatataaaatatttctaaatatatatatttatatctatatacatatacatcacagtatcttcagggctcaatcttttgaaatgtttttattccttttcatatttattcagaattgaacatagagactatgaagtaggccagatatttgaccataaacatgaaataatggtggctagattctagtatattttcacatccaatttttaatttttattttttaagaaccctatctcatctcttaacctggaagactggatattacagtcataggttcatgtggctggttcattgatccagacacttgaaggacatggccattttctgtgtttaactttctgtttggactggtctctgtatcaggtacatagtgtgaccatggatacatgaccctccttgagcagctacccacggcattattgaaatgaagctccaggtcaggaagatgagccatagtttacttgggtagctgcttcataagatagagcaacctactcctatggccttcacacctgtacccaccagtgcggggtttgtaggatactgtgagcattgtcatgtaatcatgctgtgtttatttctcaagtgagaggcttccaagatagttcctggtgtttcccttcaaacaatttctcttctcactaatatttagctaaatatttatgtttctcaaatattgatggtattttttcagggctggatacattagtcctttcatatagtagtccattggtcattttataaggaatccaagaagcatagcataagagaaaaggataaattttcatcctggcacagtggctcatgcctgtgatcccagcactttgggaggccaaggcaggcagatcacctgaggtcaggagttcgagaccagcctggccagcatggctaaaccccgtctctacaaaaatacaaagatttgccgggcgtggtagcatatgcctgtagtcccagctactcaggaggctgaggtaggagaatcgcttgaaccctgaaggcagaggttgcagtgagccaagatggtgccactgcactccagtctgggtgacagagtgtaactccatatcaaaagaaaaagaaaaggtacattttctcagcaccaagtttacgtgaatgccattaacttagcctgtttactgccctgattcctgatttctcatattatgtaatgatatttccatgttattcaatatactgacaaaaattattttatattactatttcatcatagaagcaatatatacatactcccagaagtatttgaaccagaagataatggactgttggccagtagagcagatctgggcacgggacccacagcatccagtacattaatcctttacagttccttccatgtgaattgtctgagtgtgctctttgtccattcctccttttgttaattaatttttaacaattcaacagttattgtctactatatgttagagctcttgaatctttctaagcgctgtccttcaatgaaacacagggatttatttgccagttccttatattaaagagaggatctccttatagtagctgctatataatagtctcttgtctgctttatttttaatataatactttctcagtttcctgttctccttgtaagtaagtatcatggttttggcctggacagggtgaaaattctcatactgtagaaattatcagtggacttttgtctatacttcttccatttgctttgtatatagtaagaccagccaaggatataaattctcatatccaaatttttcatctaatattttaatatttaactttttaatccaacaggattttatgttgaattttttgtgataagagagatttaaaggaatgtactttcctcagaaaacaagacaaattctacagtggtgtctattaaatatttcctacctattcatgtgtgactctttactctatatcccaaaacaatctcacctcagtataagtaaacttagtccatatttatgtttatgtataaatatatttaatatttaatagtgtgttatatatgatgttgtagtagcctgtgatataatatatacatgtacattgattttttatatatttagcacagtgtttctgggatcacgaatatttaataatataaaatttgtgattagaataaagaagaggataagatgtcaccagcttattgatggtaactgccacccccaatacctcatcttgtccccaggaggcttgctaaggcatgtggaggaggaatggagagccagatggtgcctgtggctccatgtagatgattcctacagggctggaaagcaattactcagtaccagtcccctgggaggctgccgacaaggcaggcatgttccccgcattcatctttacaaggtgtaataattaagccagcagaatcatagcattgcctgatggatgtacaaagaatcagcatggaccctcttggcttgttcattacctcaacgtcacctacacaaactagtaattactcacggaatttatggcatttacatgtgacaatgatctttgctgcattaacgcctcctaaagctaaggtccatggggccagttaaaaacctatttattaccaatgaagcttaagcattgaggatttgggtagattttactgacattacacttagagaaagattttagatgtcttcatcaagaagaagacaaagatgtgtgttggacgcagccattttgaatatatttggcagcagcttattaaatgccctagagttagcctgtttaactctgctttaaacaagcacttgacatgtgctaaaccaaagaacttctctatctgaggtgtaactgtctattatatttcttccactgacttaggctagttgcagaggaccctccaatcggtacattggaaattcttggctgaacttgaaggctgtgttttaggtctgcccttctctatcttgcgtttctatccagatgccaatatgaactaaaatagagcttcttgttagtcagcttcttgtccttgaggggcctggaggctacaaaaaaatgagaagtagccattcatcttgatatctggaactcttgccctgggaggctgtcaaagaaagaaaattctggaaagaagaggagaagttactattttttgtcagacggtctagaagcagagcttgagatggagattctgatgcaagtgatttttggagggaatgctctctggagaaagagagtgagaaagaaaaatagggtaggattagaaataaagtaaaggtgggacagaaggtctagcctcaacctggtcccacagggagctttggggtaggaattgcaccacagagctgtcctgcagaatgtcatggactaccagcagcctacctctcccagaggtgcatgcataaacttccaggcatcttcggccagggtggtactcctcagccaacaacagtccttcagagaacggtagaggtgccagctgttagcagctgacaccttcagcatctgcaggatgggtgcaatggccccgtgaagggaacctgagtggggcacggaagtactaactacagttactgatccaccttcctctttcttgcctccaacagtcactctattactctgttatgtatagtcatagcatttatcactatctggaaatagcaggtatatttatatatttactgcttattatctgtctcctttccactagataccataagctccagagcacatcagtgttgtatcatcagtttctaaacaagtgccaggcacatagttaggtaccggggacacaatttgttgaatgagtaggggcgggatgaggtaggaactttggaaatctgtgtcatgcccaactgtagtggatgctatcagtgtcccatccagatcacctcagatcctggctttttcaacccgggttcccattctccagcttctgcatgcttcactcctaacaagtgtcgtctgcttattagtgtgtgctttattagttgagatagtaatagctagaattgattgagtgctttcagcctgtctaacactgctttaaacaagcacttgacatggactaaagcagtgcttctcaggctttaatgtgcacacaagtcccctgtggatcttgttaaaatgcagactctttcagtgggtctgatgagggacctgaggaactgcatttccactgagattcccgggaaagctgatgctgctggtctccagaccacactaagagtggcaagggatttgttcattaatcttcataacagctcggtgaaataggttctattattatttccattttacagatgaggaaattgaggcagagagaggttaagccatgtgctcaaaatgacacagctggcaagagatggaagcagaatttgaatccaggcagcctgaatcccaaatgtgtcacctgaaatactctgaataaaggcctctattgaaagatgaagttataagtcaggttgaccaggctaacaagtaaagacaatgcatccctctggtggatctcacagtgaataaagtctatacactgccccaggacactcggaatcttgaacgagcatgactcaatgggagactgttccactgtcagtttctcttccagcctcccatgactccaaaccattaggctgcagttttgacagtgtttcccaatggcttgaaagtaactaatgagtgagtgccagtgcctaatagaggtggatgatggcagttataatttctcaaagatcatttgattcatcttttgtaatatttcaacatttaatataaaacagcaggcaactggagatttataacttgattcattctaattgatttcttggcttccttgggtctaattaatttttactgtgtaccctaaaatggtgcaataggcttcctgaaagctgttagaaggcagctgtatcatagtttataaaaagctgaaacttggcttttatttgataggtaaatagaaattgattttgcttttgaggtccagacataaaagagaaaaattgactccagaactcaagagaagatcctggattactctgtcttggtttgggttcccccaggaggagattccgagacaaggactctgaatgcaagtagttttctggaaggtcgtgccaggaaacctgccaagaatgggaaagtgagacagggagaggaggaagccaaataggggatgcattgtcaaataagtcatattatgggcagctggtgttcaatctatggagttgtctaggagacagcacaggttcacacttaggttttattccaaccaggaacaagtcaccaatcacatcagtcctgggttgagggctactttttcacattaactccaagcattctggacataggcctggctggttttgacagccagagaaaactctccatcaaagagatgaaagcgcttgcacttgaagctgtagggttgggtctacctgggaataataaatggcaaggggatatagacagagaacacagtgtctgttacaatgtccaaatataaactgtgctgctttgaccttttgtgcaccagtgacttctccccagttcccagccgcttgcccctgaccttgtgtagagcccataatcaagattcctgtgccactgacttgaagacctttaactaaggcagttgtccatcttacattttataatacaacactgtatcaccatttggaagaacataaattataactataaattatataaattataagttacaactattgacaagattgtgcatagtgtaaagtgctttgggattttattcatcagtgctcagaatagacctcatggtgacttggcttttagtggaccctccagtaacaatctttttgtgaaaaaaaaaaaaaagaaatgagaaaagaaatgccccatcaaactgaaaattgagtagaagcttctgtgttgcagtaattttttgtgggcttaagatttaatcttgaaaatgcaacatttgtgtttagcattgtcaaaggcaaaagaggaataaaatagtgccttccaggtcaatgaaaaataaatccagctcctgatcaggctctgctgcttgcagggtgttgttctctgagtgttctgattggcacaacacaggctttcttgccacctcccaggcccagctgctgtttgcccacctgtgagccttattcctgcccaaaacaaggaaaacagcaaaaacagtggggccactgaaactgggctcaaggtccaagaacagctttccctttgggttctgttattgccaccatgaagctacttgtggaagcccaggagcaactagttattaatctgttcctctcaactatttctttaggaatcatgtgagtgtatagacactacagacaacgaggatgatttcaaaaccaaaccatgatttatttgttgatatttggaaatgtacattcaacttcttgtgttttgttacacaactcgatggcacattttcatttttgttttagtttaattaacaaagggtgtgctcaccgtgtgccagaccataccagcacttggcaaattaaactcatctagtcttcataacttcaccatggtgtaggtactgtctttattcccattttacagatggggaagttgaagcactgagaaattgtcatggtggtattatcatgaaaataacattaagattgatgaaatgtatatattaactaattttgactcacaggttaatccttctgcccttccctgatcctatcccagatggcttttggaatgctttccaatacatattaaagggtttatctgtgctatctctggaatgttgcccaggctctgttatagtgaagggtaggttataaagtcagcacatagtggagaaaatgccatagagtccaaattaactctgaaaatgctttcaaatacctcaaagtactgcagtgtggttttatgcttatgaccctctgtggtaattctaagggagctaaagttctagaaaaactgagcctgactgaagaaagaaactttcaaatcactcagcttttaagataactctagggtcgaatggggattggatgaatcaatcaaaaagcttctgcttgcctgcaaagttgattcctttctagttacacatcaagattctttaatctcaatgtctggtaataggcttatttgttaccttaaacatatttgttcaagcacagttgtgctttttagtgaaatgtaaccaattgcttaagaaaagggtctcaagaagtagaaggcctgagtttgattcccagactcttcatagatatttagcaatgacaaattacataaagtatttgaccttcagtttgttcatgtttaaaatgggtgcataatctgtacctaaccttataggttcagtgtgaggactaattcccatgaagctctttgaagggtgcctggcacttagtaagggtgcttgaaatgtcaactcttcctgttattctaaagtcaggaggaaatttaaagaatcggttatgagattcagctgtaccatattgtcctgcataatgctataattatgaattgacttaaaaggggcctggttccattacttacaagcttgtgacattaatcaagttactcaactcctatggctcaatgtccacaactacaaaaagaggtttttaatgttacatttcttataacattattgtgagcattaagttaattaacatatgtaaaactccttggacaatgtctgggtttttaaatctgttaccactgctgtacccagaacgtagcacatagtaggtccttttgttaagtgggtgaatacactatcagtagccatagtaggaagagcttatcactttaaagtgttatgttttgattgacactgtggttgcaaaaacatggtttttggtcacagtgtgatttgatgtcatatgtggtcacattcattaatgtcaccactgatctcttaaaaaaaagtctgtaaatattgagaagcccatcaagctcacagtggtggatacaagcttcccaaaattctaagttttgcttggtagcttgcattttattattggcaacacatactgtcagttatttaccttgatagacccactttattcattttcaagaaaatatctgtcacatatccaagtctgaataaccctagttttcctgtcattctttcaagtaaaaatggtgttacttgggaagaatgactggttcagcttaaaactcagtctcctaagtgtttcagtataccggagaattattttatgtatagttctcattttgtcatacagaacatttgaaaagccacaaagagtaaaaaaatttaacaaaattaataacttttagcacttcaaggatgacattcttgaagtgtgtttttaacagtgagtgtgtagaatgaataatcaaatgatttctggtacactggaagtctggtgccattgtcttgatttgtatgaagacataagcagttttttttttagcattgcttttgtataaagtgcagatttcatctcagtgaaaaaggcaataacctcttaatatcattatgaaattattttgacctcagggaccctcaaagggtcttggggaaccccagagatctgtgtactatgctttgagaatcacttagctacggaaacattcagtagataaaactggccagtgaaagggatagcagagtcaaggatgacaccatttcccattctaagaaagtgagtgggcacagatgccattgcagagaagtaagggactagagaaagggcgggtctgtggcagaaaagataggttcgtgttggtcatgaggcatctagaagatctatttgagttgcacatcttgggacgtcttgtgcaattgttcattcaagaaagattaatagaacatccactgtgtgctggaaatgagaggaatgtttttcattcccaacctttttaatgcagaagtcattttcttagtgaaattgtaagcttctttagaggatgacctaaattatatatttagaaaaaaaattgtatgaacctaacacaatgcaagacattgacaaaatatcccagtttacaaaaaatgatattctccttcctgacttcccacaatgacatacagtttttcttccaccctttatccaggtcagacagtagacacagtcattctaaacttcatcattaatcacgaaaatgcaaattaatatcacagtgagatattgtatatacccaataaactggtgaaaatttaaaaatctgacattaccaaaagttgaggataaagtgggtcattagggatatgaaacataccctatgactcagtgtatgtacacacaatttatatgcatatatatacacatacttacacatatgtgtgcatgtatatatttatacatatttatacatgtgcatgcatgtatatgtgtgtatatctacatgtctatatgtatatgtatctaagtataaaattgaaggtaagatgaccctggactaatcttccaactagcagagcacaagcactcctgataagatggccttatcagaagtgcttgttctctgctagttggaagattaaattgacaccaccatttagaaaacaatttcacacaatcctgtacaattagacattacactccctataatccagaaaatccacttttagggatataccctgccaaaagcctagcacaagtttaccaagggatctgcacaagaatgatgatagtaatatgttaataatgtcaacttaaatgaccatcgataggaaaataactagtggtatagtcccacactggaatattacactgtggtaaaaaatgaatgaactactgctacatgcagcaacatcttgaaatcttagaaatataagccttaaagataaaagaaaaatgcaaaagactacgtgcagtatgatacattatgttcaaagcaaacataactttaaacatattatagtggataatacctgttggataaaactatacaatgaaacaggactacatttaacacagaattttaacaaggtgttttctcctggtgggtgtgtagacaaaacgatgtgatacaggaagaatatataggtcaaggcaatgatataggtaaccttctatgttttaaattgggaggtagataaattggtttttattataatgacagaatacacacaaatgtgtgatacacatattgctgagtatttttatatttataacaaaataatattaaaatatgataggaggaaaggtttctttggtaagcctttaaaattttgtaactttcatgttttacacatgtattgtaaatatgaatttttctgcatgtctcctaataaattatgagagtttccagggcaaaaatcttatttcagtcatgtttacatcttgccttaaaacaaaagaatttctaggctctattatggaccaaatctatgtttgctaaccaaaaagaattaatcaaaataaataaataaataaaagctgctttctagattgatctatagccaaaataattcactgatgttttcacttatgtacttgccaaaggatattagctatcatttggcatttagtctctctctatatatatatcctcttttttattattttatttttgagacagagtctctgtcacccaggctgaagtgcagtggcacaatcatacctcactgtagttttgacctcccgaactcaagtgatcctcccacctcagcctcccgagtagatgggactacagttgcacaccaccacgcctggctgatttttttctatttttttgtagaaatggggtctgactttgttgcctaggctagtctcaaattcctgggttcaagcaatcctcccacctctacctcctccaagtttacttatttttaacaggagaaagattactgaaccaattttgactaagtttatggggtgagttcgtctcaaccaaatactacagaggattgaaatctatattaagatagtcactgcaattattttcatgttaagaccagatatcagaacatttttaaaacgaatatgtggtgttctgtcagtaattagccattgaatatgtcaagttaatcacctaattatgtcttgctgtagaaagacatacatgagaaacttacaagcctgttttgtacaacgttgtgtcttaaacactgtgtgtgatccatctgtcctctgaaattacttggagtcacctcccatcacccgtcagtgttctttcaggaatcatacagattaatagagtcctcacttccgtgctgtgctctgaacctttttaactttaatttagtcctgacagtggggaacaaggacaagtatatgccctccaagaacccgagagctctctacattttgtctagctgaggtaataaccatgtttattggcctaggcaatgtcttttaggtcccttttcccattaactttgtagttgtgaacagttgtcttgaggttaggaggaaaggtgatttaaggaaaaagaaggagcagagggatggaatgtgtacatagccctttctttctgaattatgtctccttgtttggcattccttcctctgggtgttttgtttcattggctgtggttgagcccagcctttattgatccccctgtcccaccagcactgtgtgatgtaaatgcaaatgtctggagtcatcggggatgcttcataaagtgtggagcagacctagagaaaggttatgaaaatgtacaatgcttttccatcgttgtagcttcatgcagacattatatatcatgaaatgaccatatgtttgagtaaccatttatatggaagatgagagagtttgaaagttcatttttttgatacaaagtattttctactcagtcgcagccttttctatctcagtatatcatcatttatcttgctttgaatgaacttgagtacatatagttgtgtgtatatgtatatatatacacacacatgcaaacacatgcatacacacacacctatatatacatctgtatagatgtatgtatatgtacatgtacacacaatatatatgcatacatatatacatgcatactcctgtatgtgcatatgcatgtatacatgcatgtatatatttatacatatgcatgtatatctatatgtgtatatctatatgtgtatgtttataagtataaaatgtacgtataaaattgcggataagatggacctagtatgcgactataccacttgtgtttcttttccatattgaaaattgtcaatctttccccatttctgtagaaaaaatgaatttacactcaaaaaagttgattagccatgttaatagtaataatgttcaatatctggaaattagctgagtacatcgatatacaaattagtcaatacaaaagtagtatatgaaaaagccactaaataacatggcctctttgtttattgataaaaaattccaaaagggaagtggagaaaatggagaaaggcaattgaatgccaagtaataatcgttataaccactgaggggtggctgagagtggatagtattgattggcaaaagaaagctttcttgggattctgaggatatcagtatcattaatgcacaaccactgagaaggattttaaaaggtgaggcatagacatcactgttagaaataacagcagggcattttttcaggaagctctggccatttggtcagtcaagagctattaatttcagtgaattctgcctgcataatatgtgcagcccctagagaggccaccttcaattctaaacctcaacattcatttgctgtcttaccaccttagtagatttctttttgggtttttttttttttttgccaaaatcttcactgcatgattttgcaggctcacatgcttcttgtttgccattttaaatcacagtccccatcaaatgcccattatctttaataaggtgaagcaagaggctgggtgcttggctcacatctgtaatcccaacactctgggaggcctagccaggaggattgcttgagctcgggagttcaagaccagcctgaacaacatagtgagaccctgtttctaccaaaaataattaaaatatacagatatagtggtgcacatgggtggtcccatctacttggatggctgaggtaggaggatcgcttgagtcttggaggtcaaggctgcagtgagccatgatcacaccactgcactccatactgtgtgacagagcaagactatgtctcaaaaaaaaaaaaaaaagatgcaagaacttgaatcaagaatataaagctctgcgtctgcaccacaagagacaagagtaattggtagagtttgtgttatcctttaaagagtgcttgtgactagcagatgctgagagaaaaaccaacatatttttcttgttcctcaagctactcattattatcttgataatatttctaatatttatttttttaaactgacatgctttaaagtaaatatactgaaaaaaaccttattcactgactgaactaagtattccatttagaagtgtggaattggggctttttttttttttcctcaacatgtaatgagtcagtgtggaatattgattattcatctgaatatttaaatcttgttttgtttttggttttgtttgcatgtgggttttcttggctcagaaaaataaataattgcatgtaaaaaccatttattctttaatttcagaagtatttattcagcatttcttctattcaaatctctgatggtattacatagcacacaggaattcaaatgcagcagagcatctaaaacataaccaaacagatgtgtggggcatgtgttatgctaataggaaaggctatgcacagcatcactttaaccataaacacgctccattaagattatagacatagacaggtaggtattaggttggtgcaaaagtaattgcaattacttttgaaccaacttataggtaggtagatagacagacagactagattcattcattcatttattcattcatttttctgaagaagtagcaaaagagagactgcaaaactttctaaaatcctctagaggcaaagccaacacattatagcacctgtacttcccatgctgcatcacacaccaaatgtcttttcttgctggagtggccccatgtctttctgctggaattcagtttagactctcttagtctgttctctctatccattatcctgaccaacatataaaggtgtataagccaagctgcccaataattatgctgtaaaacagtggttttgagtactttctttctttgtgtttttgatgaatgcacaataaaatctacatttttgtcattttgccttggaatacaagtaaccatctcacacacacacacacgtagacacacacacaactttcaggcccaggcactctcccattctcaatcaacagtcttgcctcaagggcatatcattcaatctcatggatggaaacatacctgctgtccactcccaaattcacgtcactgtttcttccatatgccccttttgagtttaaggctgtctgtctgacatttccacttacatgtttctcatgcaccctgatttctcaactgcaactgaattcttaattttcatatacctccaaaacggctgttcctcaatctttcctttttagtaaattcgttagctatcaacttagttgcccaaactggatgtcaaggagtctctctgggtaccccttaggttctcatcttctatgcaatctatcaccaccacgtcctgttgatttaatgtccaaaatacatctaaaatccacccacttctctccattttcactttttctcaaggctcaaggacttactcttgcttaacttggctcactgctcctcagggcgcagctataatgttgccttatgtatcagctatctcttgtcacaataatgttgtgtagcaacaacaaaacctcactggcataaaacacaacagtaggcatttgtcacatttgagtgggtggggttcaccttgatgactctactgaccttggctgagctcactcacatgtctggggatcatcgagctgctggctgacttaggatggcttcagctaagaagactgggatgactcagttctgctccatgtgtctcatcctcccataggctagctagggaatgttctcgtgggaatgacagaggcacaacagcacaagtagagatatcaagtacgagtatttgttcaatgctctggtgtgttacatcttctaatattccattggcggaaacaaatcacatttcttagcttgtgatcaaggggcagagaattagactttgcttcctgaatggagatctgttagttccataataaggacggggatatagagaggatgatgaattaggatgattaaagccataaatccaccacgctaggtcagaaaggcctttctccccaaattagagtctcacctctctcccatttatactctctcacagcaccctttctatgactccatagccatttgtttggaagtggtttttttttattattattatactttaagttttagggtacatgtgcacaatgtgcaggtttgttacatacgtatacatgtgccatgttggtgtgctgcacccattaactcgtcatttagcattaggtatgttatttttaaagaactatgtactacccaaacttgtaagcctcatgagagcccagagaaaggagctcccttttgtttattcactcacagagcctagcacaatgcctggtacattgttaagtgttcagtaaatgtggagtggaagacaggaatggattggcagtggaattctcaaggtgcagatgatatatcctcactatagccccaggctagagtgctgcttacacctgcaggtaaagataaggacttcagctaataaattggccctcctactacaaggcctctggtttcattgagccttttgggaaatgtaccagttcccgaggctgtgattgtgatgtacttctcaccctggaccagagtcagggcaggagtcagttctacaatgctgcattacggagagccttgcctgcctatttctgctggttacaattccattattacaggacccagtcaaagcagctggagaaactctactgtatccctgaaaattcagctgtcctttgaggagtgtaacctaagacaatgtgtactctggtaatgccatgttctgcaatatcttccatgccaaggttggcatttttgttagtaatactttcttatagtgcaaagaaaagaagctgcttttaaagagctgaatttggcacctcataatttaatagtcaaatcatttgctgtctattttcaagggttttcaggggaatttaagaaccaggaaggactgaaagatccataatactttctttttctagcaaattattaatgcaaacagcattagtacaattgaatacaattgcaaggaatcaaggggattataaatccaatgagagaaaaggcagccagaatgctaagagagccaccacccactgctccaccatgacccgccattccacgtcccatgctatcctccacacactagacacatgcaactcctgctgccactgggttgtgatccccattgtccttctggtcatgctgtttctaccgtctggaataccctcccccacctttcctgacagcccaggctctactcaacatctaggcactaggtataaatttaaaatgtgcaaatgctttgacccagtacatttgctttgaaggatttatcctcgggaaataattggagttgtgccttgagtttgcacggcaatatgccaggacatttgcagtatttacgtcatctccaggagttaggatctggtggtcaagaatgtggctttggcatcagactgccttgattcaagtcttgccttcaccatttgctggttctgtgactttggacaaatcatttaatccttttgcctcaactgcttcatacctaagatagaattgatatcggcaactaactcctaggtttactgggaagagtaaaagtgtcagtaaatgtgaaatactttgaacagtgcatggtgctcagtaagaactcagtacatgtaagcacctatgctttcaaatggactctcattcgttgagaatttttcttcattttcttgctgtagttgctattagtggaacggttagaaccttctctttgtattctttgcaagctttaacctactgttttagatatatttgatcttcagtgaacagttgttagtatgtcaagaaaagtaatgaaggttcttaaactaaacttaattttttatggaggaacacaaggcaatttgctaattcggggatctacttctctttcatgatagcatctgcagatgtcatgacagtttttcaagaccctggcaacttgataatgtggcccaaatagggggccaatttcattctgctatgagtccaatttaaacaggctcgattgcgtcaaaattagacttttaattatactttatctaatgtcaggaatcagtgttgtgctttagctatttaaaactttggctttcaattagaaatttgatagcaatgcattgaatgcatctcttcatcatgttttcagaatttaaatatctaacttttttcttctttgattaaagaggattccaatcattgctgcttgtatacaatgtaagttacatacgctaatgcctcttcagttttttaatttttttaattttattttttaacataccccttcatttatctatatacaaattgtgtcagaagacaaaattatttctgtgtttttcaaataaaaaatagggtcccttttatttttcaaggaatgatcttctttattaaatattatattataccacaatataacatctagacattgggagggatctttgaagatggtggaagacagtcttgatataataagattgaagatgaaaataggctaatagaattgcaaccgattatactgggtgtacccactgctatgctgtgaggtagggatcaatgacaaagctttgtgtacttccagagattggaaatatctatacaaagagaggtaaggagtagcctttccttgtaaaagtagaattgattccatattatatatcctctgtatgtccccgaaatagaaggtctgctcccatgagcagcttctcagaacataagaagagcatctgggctgaaaaaatgtttcttgtttcctccttgttacctattctttgtatagatccggggtttcaacgtaaaggtcatgattttatctcctcagtcatttgttgctgggcacaatttgcctttatggcaagtgttgttgctagttcttaaaactaccagaagagatacttaccctcctgagcagacagaagctcaggagtgccacaaagatgaatatagattttaaaagaaatttaggtaagaaactagggaagtgataaatcatggccccctgttaaacagaaaactcattaactggaatactgcgttctagttaagtgacattttactatccttttttgtacatagagcattacttctttaataaaaggattacagaagcacaatataaagagggtaatttaaaaatctctaaacagtgaaaatactactttttacgctttgaaatggctttttatgtccagtccgagtgacacttttcttccttagtaaaatcagcaggcacttccaggtggctgaaatccaccctgtgcattgttgctgagaacatttatagcacattgttcagattagaatagctgagaacgacagggggctcttcaaatgtgcctcatcgagtcccaaattggagatgtgtttttgtcatttcaaagttttggcagtagggtctaggattcaaagcaaacaccagctcctgcagaacacaagccttaattaatttccagcaggaaatgagtgattgccaataagccatgaattaaaatggaatggttcaccaaaaaccaggtcctcatctcaaatgaatagcatttcttgctgttttcttgaaagatcatctcagactaagaagtgagcaagctcctatgacagctctctgtctgtaagggggtagttggtatggacaaacaccaaacagtaagtcctggcccagtaaaaaatggggaccaaatctgatggactcaagggcattttgtcagtatctctatcatgtagcctgcaatttttatggagaatctgtctatttttctggcttcattatttatcatgttgtcattaagattcagtcttgagaaggtccttaaaggtcagctgttttcatcattcagtcagtgcttacagtacactggggctacttctgccaaaggggtgtccagttgctgcttgaactcctcttgtggccagaaactacccccttctaagagaagcctgtttcatctctgagcagctcagccagttttcattttttcttaaaattgagcaaaaacgaatcccctgttgcttaaatccattgagcctggtttatccctgagggccaaacacaatgaatcaaaaaccttcttctgcttgatagctctttaataaaaggggaaggcaggtctcacactccccctgaggggcctcttctgtggacaaacatctctgagcttttcctatcttctttgagagtgctttgtgtgtgtgtgtgtgggtgtgtccacttgctcttatgtaaattctaattactattgtaataataaatagccaatacatacagaatgcttccagtgggccaggcagtgttctaagtgctcccataatcctcacaacaactgtatgaactggttactaggattatcccattttacagagaaaaaatgaggcacagagagattaagaaacttgctcaccaggatctgaatccactattccacactcttaaccccagcactataaagtttctcatgtcctcatttgtctatttcagccatacctgtcctggagacaagagccattgctagttttctatggggaactgacattgctatcatctactccacactggctatatgctaggaactatagattagttggtctgattaatcctttgaacagtcagcaatcattgtttttgaggatgtgttgttgttattgttgtttggtccagcacttccccatactatccccattaatcattaattatgttgttaattaagaacacctgtacttaactcgtggccatttattccttttctagaactatttattgtctatattttagagaaccttaaatatgaaaatggttaatccagaattttttgcttgggccaagcaagcaaaatgcattgctgctttatgaagaagaccttcttttggtaagaagacagtttttcatattttcatagccagcaattaaaaccacatgagacaggaaaaccttcaaattctttctgagcaaaatactcttcctagtgagaaatgtgctcaaagtggttaaagataatgggaagcagcagaattaggatttgaactcgtgtgcttctgggccaaaaccatggagttcccattttgcaaacacaccttggggtctgtaaccaggtgcggctccctgcaggtgccaaccacctgtggtaaaggcatgatgagtccacttcctgtaaggctcagccctgctagtcgcgactagcgccctctagtggtccaagagaaagggtaaggtgagttccggtttatgatttgacttgaggcattcggaggctaaacatccacaaggttagttccctgaacccctataaaccttgctatttatatctcttcctcaactctgaggccctcaccctacatcggctgcagtacagattcagcctttagcgacggaattatgtactgaaacactcatttctgtgccgctgcagtggttagctttgatttttatagagatgcacatgagaaaacagtctgagcctggagagtgacttgtgggctgctaaggtaaattgaacccatgtgtgtggtatcctcatgattgggagcagcagcagatggtgggctaggatgcctccagaaatgggcttcggaagcataaaataaggacttgttctcttacatctgcctctgttggggtgtttaaagaattgttgggattaatgcatttttcatttgaagtttaaacactctcagaggatgtttagccgatggactattctcattatagaatgaattgcttcactgggttgcactttgcaaagattggctgcagggagtaagtgatttgttggaaaagaaggagcaaaaaagggtggaaagagcaaagactcagtgtctcagacaagtcttcaacttttcctctccatccaaaatgaattcattatgactgagaggttccagttggactcctggagacatttagaagtgccccagaaatgccacctgcaggtcagtggtcatgtcaaactagaatcttctgcacaagtcaaatataagaaggaaacttgtttcatttgagtcagatttacttaagttttggattgactcctagatcggcttctcactttgggcaagctccttaatgtctgcaatccttgttattttcatctgtaaagtggagcttgtgatgcttactttgtgagatgtctttggaatcaagcgaagtaatgtctgtaatgcgaatagcctagtgcaggcatacaacagatgccccatctaatgggattatattaaaattattgttgttttaatattggttatgaaaatattgcaaagtgaatgaagaactctccttttacccaatttttttgttcaattttgtacgtgaacagtttaaggaatcttttaacggaatttttaaaaacacttggaggcggtgactctttaaaagctaaaccatgaaatgttaccatcagaaaagagctgctgctgccatttacaagcattaaccaaatcctcaagaattaagctagaactgagcacattcttaacaaggtggtttcgagttttcagatacatctttatttcttcagctcatttgcaaatacttatctctgatttaaatcattcaaatgacttcaggaacacaatggaagcagagcagaactaagtgtttccaactgtcaggtctggtgagggatgatgtaaaacgggacatttagctggcatcctgcatagtctttaaatagaattaacaaaagcttccacgtttcaatggctaaaggtagtgtttattgtaaaggcagcatgcctggagacctaagagtgggagtaggggggtgggcatgggcacgtgtgggtgcaggcagggcattctgaggggtcagttgaaaggctctgtctctggattcagctttaactggttctaaaataatgaagcagaaatgactttccttctctctctggtgtcagcttcaaatgaattatggatactgaacctacagaggtaatgctgattaaataattgaacaatccattgattaactacagattgtcaattggaataatctgtcgacgacctgactgcccacctttagcatttagacagtattttaatgttaatgaggttttgaactttttgtgcttttggtttggtgggggttttttttgttagtttttgagggtttttggtgggttttttatttttggttcagcacttccccacctaatcccaattaatcattaattatgttgttagttaagaacactgggctgggcacggtggctcacacctgtaatcccagcactttgggaggccgaggtgggtggatcacctgaggtcaggtgttcgagaccagcctggtccaacatggtaaaaccctgtctctactaaaaatacaaaaattagccgggcatagtggcacgcgcctgtaatcccagctactcgggaggctgaagcaggagaattgcttgaacctgggaggcagatgttgcagtgagctaagatagtgtcactgcactccagcctgggcaacagagcaagactccatctcaaaacaaacaaacaaacaaacaaaacaaaaacacctatacttgacttgtggctgtttattccttttctagagctatttgttgtctgcattatagagaactttaaatatcaaagtagttattcctgaactttttacttgagtcaaataaacaaaatgcattgctgctttgtgctttatgcagaagaccttctcctggtaaggagacagtttttcatattatagccagcaattaaaaccacatgagataggaagaccttattctaattctttctgagcaaaatacttgcccttaatttattatttaataaacacatatatagcacttaccatctgccaaattatttatattcttttaaatattaaccaatttaatcttcatagggactttctgagtaaagaactatgaatgttcagccgggcgcagtggctcatgcctgtaatcccagcacttcgggaggccaaggtgagcggatcacctgaggtcaggagttcgagaccagcctggccaacatggtgaaaccctctctctaataaaaacacaaaaattagctgggcacggtggcaggtgcctgtaatcccagctactcgggaggctgaggtaggagaatcacttgagcctgggaggcaaaggttgcagtgagccgagaccgtgccactgcgctgcagtctgggcaacagagcgagattccgtatatcaaaaaaaaaaaaaaaaaaaaaaaggacaactatgaatgttcctgttttacagatgagaaaactgaaatacatggaggctacataacttgtcagagatcactagtaagtggaagaggtgggatttggacccaggtagcgtccatagcttaatcagtgctctctcagtactttttggtcataactcttaaataagtgtaataataataaaaaataataataatgtctgccattcatagcattgtacttcttctgcctttgtagtgtagttcattttgaatcccagatagggactcatagatttttttctttttaatatttaaaaaatctcagatttgttgacttaaaatccatatagttttttttttaaatgtggacctagaactgagtattattgggggaaaaaaaacattgtaaattagtaagtagtgtggttcatgggatcatcaactgttagcgctgggaggaatagtatttttctgacccattttattttgggaatgaagaatctgaggtgggagaatctctggttttatacaacagtaggttgcccatggctttctttctgaggagactgggggagacacttggataagagaaggacttctgtgaacaagggggtatgcttttctaaaaatgatttgattaatccttgaaaatatccttctacgaggcacagagggaaatcctccctacccccgaataatgcacaagaccttactggtctacaaaggtcctgcagatagaactaaggacaagagaattcctatgccgctgtaatggcctacataggaaaagcattcttcttgttgttgaataagaaaacataacatcctccagatttctaccagtgtttttcttatgactggaaatagtaagtagaacaatgtcatacttggacaactatattcaaactggctaatagttttgttaattgggactacaaatgagaaatagaagtcccatgatgacctagtccattgaagtgtcaagtttaagtctcctagttcagaatcaaagggagcagctatagggtgagaagcaatcgcgtccataattccgttgacagcagttttcttcgggctttgattcatagctcatctgctccctgctgattgccctgagctcagcaatgccatgctggtttccatggtgctgatttgcataccaaaccaggacttgtatttttgtgtttgcctcacacatttccagtgctaagtgttcttctaagaaagggattagcacgctagccaattaagggagtttgccagaaataaagcacccagggaatttttcttcaggttatatattgctactgctatgcctaagtactgatatggttgattggttttcttaggtcagcaatgagtcttaaagataaaatttctactgtgtaatctttagtgttttcttttttttttcaactatcttttaatcagtttcaaacatttcagtgattaaaagagagatttgttgtggttttgttgtggagcagaaatggatttcaaggagtttaccttcagagcttttgtttttgttacggtgggtctctctagtggaaaaaaaatttccccatccctttggaaatattttctttaaaggaaatcatgtttttaaaacaaattatcgaaatcagctttctaatcaatttgaatcatctgaacaaaagctggaaaatgtttagttgtaaatttcaccaatgaatactacttagcaacacaaagttgaatgaagttcaactgttagtcccaagcttatggatcaatctcaaaacatgatgctgagtgaaagaagccttttaccaagagtatatactgttttattgcatttagatgaatttataggacaaaccaaattaatctatggtgaaaaaagaaacagcagttgcctctgggtgctgggacagggatggcctggaaaggggtatttgggggctgtctagggtgatgaaaatggtccattaatcatcatttatcttttgtttgttttgtttaatttccatttttattttagattcaggggttacatgtgcaggttggttacaaggatatattgtgtgatgctgatcccgtcacccagatagtttttcagtccttgaccccctcccactctccctccttttggagcccccgtgtctatcgtttccatcttgatgtctgtgtttacccaagattaactcccacttataagtgagaacatgtgatattggttttctggctttgtgttaatttgcttaggattaaggcctctagctgcatccacgttgctgtagaggacatgatttgttattttttgtggctgctgcatagtattctatggtgtatatgcacccccactgatgggcacctgggttgatgccatgtcttttctgttgtgattagtgctacagttttatactactctcaccagcaatgagtaagctttcccttttttctacagcttcaccaacatctgttattttttggctttttaagaataaaaaatggtctatattttgttaggagtttaggttatgtgtgtgcattcatcaaaacttgtaaatgcccacttgggatgtattcatttcactgtatataaattttacctgaatgtaaaaaacaatctgtaaaaataatgttcttcattgtaaaatctagagtgatcgttatcaaagacttagaaaaactagaaactgagaaaaggtggtatgatttgtggcagttcaattggcagaatttagaaatcatgaatagatatgtttattctgctatttcaaatacttatgtgaatctctagagccatgtgggaagatatctgcttcctgaagctctgcattcatttatagttttatgtggtcagggaggatttgattgagttggaaagtggatcatttgtacttcactttgatccatcttcctttttagaaacgagagaaaaggcatctgtgattgtgcctctgattgggtggcatccaaaatcttgtttctcagggtgagcttagggttcatctctattaaacgtatcatttgtcagacattggcatgtctagtgattcggaaagcccttggagtagcacagaaatgctatcataactccggagtgatcttttgcccttaccagtactttggcttttttaagttgccacttgaacttgggtaagaggccaaggaggtggtggctgaggcagtcaaatcttgtggaatgtggctgtcaattgatgccctaaagttaaggttggtctgtattccacaattgacaaaaacacatatacagttgtgggcccagaattggagtgatgagaagaccttgcataatgtctacacaggaggagagcaagcctttaaactccaactgccttgtgaatgttcttctcttttgatgtcccctcttccctctcactgctcaacctctaagtccatgctgcttgcatatacagataacggtgagttgcagatgatattataggtggcctatccagatccatgtcacctggcctgtgcttttagagccagctgctgtgaggattagttgggaagactcacagctgccttcactctcagagagttatccttgattgctggaagttatctagccagggttggttatagatctacccacccaccaatgacatcccctctccccgcctcctcacgtccgcttctcaagcgcgcatacaattcttctaccccgcaaaagcctacaggactatcccattcccacagttaggaatgactccatggtacttttcatggtccagagctctctgtgggatcaggccaaaaactgcactttatttatcttcttcatgaagatggtgaagaatctcaacagaccttcaaagagatcaaggcttgcatctaagacaggatcaatgattgcctctaagaagaaattacacctggatatttgggtacctgtaattaggtgttggctatgttaatgttttgcctgctgtgaagctactgcatgcggtgcttgggtagtgccactcttcttacatgaggcagaaccaagaggaatgaccctcccacatagtaatgaaggggaaaaaacaaggcaaagcatgtttatttttaacattttgctcttcttaaaagggcatcgtttacacccattccatctgtagaactttcaacacaagggacacatactgaagtaatataaactctgaccttgagttattagaatatgccagagactttgtagttcctgagagccacaagcctccatcttttctctatagaaaaaaaaaaaggcttaaatcattggtcagctctcctgtgcttgaaattgtcaccgtttgaagagtggctgtccttttcaaaatatttggcattatagagtcacagaaaaagtgttaactattctgtgcatttacttatgttgaaaatgatgtcatgtatatttgtatttaataaaatgtgaaaggaaaggaaaataagttcttttcaaaataaaattttggtgccccggaaggtttctcagcctgcctgcagcatgagttttacttaaagcaaaaagcactagcattttttttaatataatgggatgcaatagaagataactatatcaatcacctatttgtaaaatagtgctgtgtaacaaactatctcaaattaaaataattaaattagctcaggtatttttagtttgtcaacatagactgggctcagctggcagttcttctggttctggctgggctcgcatgtgcctggcagctggctggtgtttgagatgatggagacaatgaagctacatggttctcattctccagcaggccactctgagcatgttctcatggtggtgacagaagagcaaagatgagagcaagcaaggcacttacaccctttcaagcctccacctgtgtcttacttcctaagatcttattgactaaagaatgtcacctagtaaagcataaggtcactgtaggaggtcaatacaagattaatgatcaaatatgtgaatgctgggaggagcaaagaattggacacattgagaaaatctaccttatacaagaatatacatacataggaaattttattaagtgaaacatgaaactcactagctagaaccccaaagctacaatgtacttcacattttctctctgttttctttccagaatcttgctcctactcactgaccttgacctttctcattttgaacacttcatttctgtttcttggaatatctgtttttcttttctatccaaatccaaaatattcctcaaagcccagctcaagtttatactttcctggaagcctaatatctgtgtcattgttcaagtttgtttttatattactttatagtcatgattatttttatctgtataacaatgtcttgttgcttcaatgtagtctaagctccttcaagtaaggaaccatgtcttatacttacttgactctcccgaagtaggcttattgtatagtaagagtttaatagtaagttgattgacaggtagttccattttcaaagttctatgctaatcccttttttctttgtctctgccaacattatcttcctctacatctgagatggcatctcgagagtcatcttcagtccattagtaacagctgtcttggagaattatataaagaacaactctagccataactaggaaagttggaatgagagctaccatagattagtaatgtctgccataaatagaggaaggggataggccattcatatttactaccaaaatagttcttaattttttttcggagttgtatcttatcttctaagctcagtggagaaatagtaatgatattcattgaagggaaatgatagtgatggcaaaatatcagaatatatgtaagaagccatatattcaggaaaaatcacttaataataggcagtattatgcccacagaagggctttcagccaacagacttgacttcaaattctggttctgctgattactatcactgtgactttaggcaagctatataacctttgtctgcctcagtttccctatgtgctaataaatggcaccaaatgagggttgttttgaggacttaatgaattaatatactcaaaacgcttagcatttgtcttggcccatagtaagcactgaataaaatactagctactattttttattaagtagtggtaaaaattacaaataggtaaaacatacctttaaagttaagatacaatgtaactcctccatttgaaatcttagatgagggcagttgatgagaggaaggggaggtgagtgaccctgggcctaacagagagctaggctattcctatgataccaggaacaactttgagcaatgattttgccagctactggcactttatttcagtcatatttaattagagacacagagccactaatcaagattggttaccggatttgaccttatgcaattgtggaagctattaaacagtccctatgagtctgtagtcttcacatctgaggatggagctcaaagccaacagggaaggaaggatggatataaagtgggggagagcaaggcaagctgggctcatgagctagagccagaccttaggagaacagactggaactcaggtcagttcttacttcttccatccttggactaagcagggatcctgtaggagaagctggctccttcgtcatggagctgaacatatgtctgaccgaggaagtaacatatatgtagggacagaaaagggtgaagcaattgcatgcaaaataagtgagccaccaaaaaagtgacaaagggcacctgccctgacctgagtgggaagagaagtggggacactttagtttgtttttccagattttctgcaaaatgtctcttgtggctcatggtaatcataaacagtgggaaatcttgttaaccctagttaagctgacacattttgaagagtcaccatactcctctagtgaccatgtggtacaacagaaagagaaataactggccttcaagtcaaaagatctggaagtgtaaccttggccaaaatcacttaccctttctcacttgtgttcttgtgttcttagttttcttatgtataaaatgagggaggaaggtgggctttttcatccttaaggtcccttccagctcttagtctgtaattttgtcaccttactgcctactttcattaagtttcttgtgtctgccggtcttgcttacatatttcctgctattctgccccaagacagccagccaagccaaaatgagcgtaggcaagggaaagaagcctgagtgtttgcctaaacacttagggctgctgaagtcagatgctgagggcaaagggcaaccgtaagtgatggaattaaatgtttactgtgttaaccgttgaccactcatggatttcagagaaagctgaccatattgattggagttttcactcctgtttttctaatgatatgcaatcttaactaaatctgccagctctcagggggttgaacgctattcagcaacattaatttctttgcctacttccagttaccagcaattataatcttggcagttttactcaccttgaataagcacttgtatgctttattgatatctggcagagctggctccttccatgcaaagacccacttatgtttctgacactgctaactctacaaagcgctcaagctgcagatcaacatttgttggacattctgggggaagatgttatttctgaatatggcaggacagaaagttccaagaaagctcaaagaaattgtgtttatatgctcttagacacatttttttccatcccctcccctcaaaatcagtgaatgagccagtcctgaaagacacttggcacagtttcacagtctcttattgacaatttccttgctgggaattcacctagcctggagagagcgatcttgcctgtaatgactccttctttatagcatacaatcaattagtgcttatccaatatttaagacccagcccctcacgccaattcaggacagttctgttggtcagtctcaacccggagttcccatgagattggccgagacttctatggcaactgtaacacagccaaacttctgcttttaccccaactactcccttccatagttattaatcccagaactattctctaataaatgcctatatacaaacccctatctccgggtttacttttccaaggaatcagtgatataactgccatgacaatgaaagagatcaaaatttgggagacagaaagacgaggggtgggaagttgaatttttttcctcatttataacatgatctggttgggaggattcaaggcagaccagttagtacagatccccagtcccttttggggatcataggactcttgttttatcccctcacggcatttatcaccttctctcataaaaaatttatttatttattatgttttatgttgtttgcctactttctgtctatacccacccccggcccagataccctcaaacaagaaagtaaaacccaccaagatgaagttctttggtttgttcaccagtggatttcaaacacataatagatggcaataaatgctaagtgaatgaatgaatgaatgagtgaatgaatacagtcagggagaagagctgggaggccatgacagtaatgtaggtgagcagggatagaggctgaatgacatcaaagaatggggatgagaagtggatagagtctaaggttttgtggataatagaatgcataaaagtgctttagaaacacataaagttctcacacttgagggtacatcagattcccttggagggcctcttaaaacacagattactgggccctatccccagaatggatgattctggatgtctgtaatcaaagtcccgtttgggtcattatttattttagcaacatccaccatcatagattgtgagccccatggtaggaggggctgtgccactctgatcacacaggctgtctttcatcactagtggagtgtttggcacaagctagtactcagcaagatttgttgagtgagtaatttacacccccccatccccccgacacacacacacaacaccatgcaaatctatgcaatcagggcacttgcaaatccttagtattatcaaaagaaaaatgcaaattctaaggcattcttatgccccagttttgaccagaattgacctgtgaagatgagctcaacatccaatccagattattcttagtgctgttcagagtgggaggatcaacagcctctgctggtgtatgctctcactaatcattatccttatttccagttaataaggtttttgtctattttattcattgtagaaataaagaaaagagttagtgttgaccttgtaaccataaagcttcatagttttaaagtcaattattaaataacccattcatctttcttcttttagtttgtttgaaactctctttttttaaaattattttctcctgggcactactggcaacatttatttttcttccattgagaattcattaagaattatttcttttcttttttttttttggaaatttatctaacatctcaacttctttattggaatacagagaccaacactgaacttggaattcataagtaaaatggcagttacaaccagatattatttctcttaagccttatctctgtgatgcatcctagtattcataactaggtcttaatcaaaaaattattttgtaaatttttagacagtgtatgatgttatatgacttctaggacttaaaagtcttttgacttttaaaagtcagagatatgtattttcctttttgaccttacagtctaccacattcattattaattcctaacctgattttctagtgggagaagggggaggaatgaaactttcaaataatgtaatgcacctgaattaagaccattttgactagtcaaatgcagatatgcagatattttaggccttctgaacctttcatttcatagaaatagaaattgccccccccctttttctttggtagtcatccagcttgtttctctgttgtacaaataaaacagaaattaggacagcgctgagattgttttattcatccctgagttctcagaggttagcacaataccttccacatagaagatgcacggaaaatgtttgttgaatgattaccaataatgaagttttattatcatttttatccaagggcactgtatttcattctgtctatacccactcctgtgtttattttttttgggttgtgtgacaatattatgttcctggaaaagcaactaagaaaaaattgaaaaaataaatgttttcagtgggccaataagatggttacttttgtgcatatttttgtggtctgatgttcaaataatacaatagtcagagaataaaatccttaaaaataatgatttataatctattaagtgtcaaaagtgagagtagtcatcccttcttacttttataaaattgtcactcttttttgtttggtaaaagtgatatctttttaccagcccttccaacagctaattccttccactgccacttaaagtagtctgtgtttagctgtattacatttatacctactcaacttatcttttagtaatgtagtgtgtattatatataggcacccatacacatatgtttaattatgcaatgactgctttcttacagcttctaggacatgggtcttagagtcacaaaacctagtgttgaaatcttacttctattattgcatcagttatttactgccaaataatgttgcataactaattactcccaacctcagtggcttacgataataagcatttatttagctcatgtatctgtaggttggaaatttgagtggggatcacctgggcaattctggtcttctgggctggctcactcatatgtctggcgagtagctgacttctgtgatggggtgactgggtcatgtgtctctcatcatccagaaggctagcccaagattgttcacatggtcgctgggcagggctctgagagagagtggagagcatcaggccctttgagacctaggctcagcatgacacactgtcactctggtgcattcttggcaaagaaaaaaaaaaattgcaaagctagctagaatgaagactccactttttgaaggcaaatggtgttgagtacaagaaggagggggtgacttagggccatctatgtagtccaccagagctattcacaagctgacttggaacagtttattccaaccttggctagataaacaaggagagttcatgcttttctttttcttattgtgaccccatggagggtgcattactctagtgaaataaagattctccttatttaccaccaagacatgggagtgaaccagcatacataatgtcactatccaacactgggaggaaaggagaagcctcttggggtggggggaagggggagggatagcattaggagatatacctaatgctaaatgatgagttaatgggtgcagcacaccaacatggcacatgtatacataagtaacaaaactgcacgttgtacacatgcaccctaaaacttaaagtataataataataaaattttttaaaaaaagaaagaaagtgtttagcacgaggttttgggtgaagaagatgagacatgtgaggtccgggggcatggcattttggctgcctagatatcccaggatttaggggaatgcataactttctcactaagtatatgatgaatgagtaaatatgcttctctatatgttgttattgtgttgttgttaataaagtgtgtttttcacactgtaatctttcagagtaacacagactcatatacatatgaaattgaggactgtgggtatcaactacaaaacatccacgtaatagcagttaatactatttgttacatgccagactcagttctaggagctcccttctggtaacacagttaatttttaggaggtaagtattaggtaatataaacttccctattttggagatgaggaaattaggttcctagacattaattgtgtgtcccgaagtgacacagctaataaatggcaatggcaagatttgccctcaggcaggaaagctccaggctcagaaccctaaacccctattctacagctgtggcttcagttagggtttccatatgtggtcactgttgtaattctggctttcttcctttgaaccaactctcaggaaaaccaaaccatgacttgcatgttgttccatgggtgtttttcatccttctctggctttgtcttgacaaagtcatttggtacatatctaataagactttcctttgccatccattcacgtgtcatcaaggaatgcaaaacagttttaatgcaaaatacttgtaatattaggacagaaagaaagaagaaagaaagaaagaaagggagggagggagagagggagggagggagggagggaaagagagagaaagaaaagaaagaaaaaggaaagaaagaaagagagaagaagaaaagaagaagaggaagaagaggaagaagaagagaagaaaaggaaggaaggaaaagaaagaaagggaaaatagaaaaggaaggaaagaagaaagggaagtaaaacagggagggagatagagaaagaaagaaagagagagaggagaaaaaagtataatggattccaatatttttctgtcatcctcaatgttcggctcatactctgtacttctgtgttagcaaacataattgaaataaaccgtttaggtagtaagctaattctgcagcattcaaaaaagacagcgtgcaatactcacaatttgcaaaactgttctcctttttttgtttgcataggtttatacatgttccctttttatagcacaatgtaaacacatgtgagaaaaactgatttgaaatagattttaaaccaggcagcccttttgctgtttcctaattggtattcatcatacctcttattgttgtgttctaagcatttcgttcatttgtttttcagtcctcagtttcctcatataaacttccatgatctgctgcctaagaatttggtatctgttaatgaaaatcaacttttaaaataagcattcttcctgccctggcaattaggagaacctttgaagacattgggggagtgatatgggtcctgggatgggaacagtaggattctgataacaagccaaagagatcagaaattcctttaagtattttaccggtaccccatagtcctcaaaatcacatacacaaaatatcatgggtacagatcaacaacaaacttagactggctttataacagtgcaaggtctaaaactttgttaccaagtcaccaaaatattcccaaataagtaaaaatcccacattaaatgccaccatcctttgtctcctctctcccccgcattgggttctggaggactttggtcatcatagccgacatgtcagtgtcccctcgatagacattcccttggcatgcagtatatactgctagcatcttgttataagtacctgtggctttctaagagatttctctgggttccacaatgttttcagttacatgctgggcatgctgaaagtatcaaggaattaaagcttctggaagcagccgtccactagttactaagggatttgatagaaaaataccccaggtccatcaggttttagtaggggcggatctgaggcatgttctcctgatctagaattccccagcagaactgagcccccattgccaacaatggttgcctatttattaatattctttattttggcttctttctcttcattgtcttgtattcctgctcacctgtcattgcttcctggggttcctttccccagataatctccctccacttcagctctaattcagtgtgtttctgggaggactttatagaagacatctaccataatattacaaaaattaaattactgaagctattcaaattattttctgatattttcattctgtccttttcttacttctatcaacccatccccatgtgtcttttttccctgcagtccaagattatttagccccatcctacaaggtcaagtattttatacaccagctaaggagtaaagtgtaaaatttttaaaaaaaatcagtaggtagaatattacactggaatcttaatagttcttgctgatagtgcccttaaggttaaaaaaaaaaaactcattaaattccaagagagaagatggttataaaaactgaatgaaaagatagaagttattccacaagcatttcttaaattagtttgttaagagccttagatcatcagacatcaagtagaaaaacacttatccaaatctacagaaagcatttctcagaaagtgaaagaatgcagaaatttacttccaaagttttgaattaaacatgacagaagaaggcatcaatttggaaaactttctcagaactctcccttgcttggtagagtgggcagcttacttcatctgtcagaggaaaggaagtagctgttactgaccagacgacatgtgttgaattgtttgaggctgtaccgcatgtcaagctttgacagaactgacataaaaaatatacctcacattgtgttagaattgaagagaacagctcttgttcattagaaggtgaggctcttcaaagaagcttcctgatgcagcccgatctccagctcacagaatgaaaagggtttcctataaatctcagttaactgattgctttggagacacagtcccaagagggatttgaagccagcataaacttgattatatgcacagcttgcgggatttggtcattctctttctttcggatatgttttgtgttctttctaaaatatagtcagtgatattttaagttgtttataaggtatttataggaaaatttatttataaaatacacaatgttccaattatcaattgctgtataacataacatcccaaacttagtggtataaaacaataaccatcatttgttgttattatctattgtggttctgtgggtcaactagtccaggctagataataatctttccacgtccctcaggaatctgcattcagaggatgcctggggctagagcatctcaaaagcttccttccccactcacatatctgttgtcttgtctagggagacccaaacagctgggcattggtgtctattcctataaactctctccttatggcctctccagcaggatggattcaggatagtagggcttctcattcggaggttcaaggctccaaagattcatgtcctatgagggagcaccaggcaatagctgtgttgcccttcacaatctaggcttctctaggttagaagcaagtcactaaagcagcctatattcaaggaaggggcatcgattttacctcttgatggaagaattgtcaaggaatttgcagactttttttaaccattacatttaatgattacctttcatcatcatagggccttattggtatttgcaagcctagttcacttaacctaataccatgcttagtcattgccaaaaaaaaaaaaaatctggctaatttaatgtatcaacaattataatatagtgatgcttttactaatttttatgctctattcaactatcctttaaaatatacttatctagagggaagagttaagtgagaaaactgaagatttagaagtatgatgttgatttctaaatcaagaaaaacatatgtactattgctttttcactgaattaaactgatttttacagagtgactgctataatcataacactgggctagactactgtgattaatacaggtaagtaaagacggttttaaaattatgaacagaacttagtcctagttcacagtctctaaactggtaggggtgtgtgtgtgtgtgtgtgtgtgtgtgaaactacgtgacaaggattatttacacaccattatagaagtcacactaattaaatctaatgaaagacatgtattcagttttgatattttccgtaagagtcaggcaaaagttcccaacaaacttctaaatctataatcaatccaaaggaaattataaacaataggctttgtatagagagagtaggtggatcatattaggcaataatcacatagttgatttcttactataaattatgatttatgtatcataaatagcatacaaatgtttgttaaatgaatgagatcttacaaactattactgggaaaatctttaattggcagctcttctctgatacggggactccaagggtccttggaacctggggactggggacttcctgattattttcaagtagaagtgtttgatttatagttgaaagagaataagaccattaatgttctctcattttttttaaataaaagtgtaagctctgccaaggggcattttctcattggctttcagtgttattttggtctcatgaattcataaacatcagcatctctacctatttccaaagaaaaaaaatttacttatgctcaaatccttgtcacagccactgcttctagggaaacataaactaaggcagggtgattgcagttctgggtatttgaaagaggttcttatggatttttccatgtgggaataacgtctaagtaattttccaagaatgaaaatactaaagtttttgataattaaagatactgacacagtacagacacaaacaggtttttcgggtgcttttcttgtgaagctttgcatttaaactgaagttttattcatgtaataatcatgcccctactattcgcaggagtaggaataatgggagttaacaggtgaggcagaaaagaaaggacatttcagagatgctctgcaataaagaagtgactgaaaactatagcactggtttttcttggttggatgaattaatgcacattctgaaaaacagtgttttagatttcaagttccaggtcttccagaaggagctatcatctgagctaagattgatgcattctagaccattattctggactcttctctgataagcccatgagataattttgttgaggtgtgatcatcccagcgttttagttatgtttcactggaaaatttaaaatattttaataagcaacatttgtttgggagagatacactgtccctgaacttggcctactatgatgggaatcctctgttctgttcaaaggcagttttctcaggcacctatggagtcagagactgatgtgacacttaagtggtacttactatgttccaggtactgagctgagaaatttatcatgtattaattcatttaatcctcacagccagccatttaatcatttcatctattttaaagacaagggtcaggaaggttaagtgacacgtgtaaggccacacacatatgatttgctggaacttggattcaaacctgtctgtccttagagtccatgcttttgtgagactccacctctggctgttcctgaggagttcctagttaagcgggaatgggggtgggcaagccagtgatgacagggttaggtggatactggaatattcaggaagtgccagaaagtacagaggatgaaaggcttgacttcaccttggatatttaaaagctccagaggacaacaccttcatttgaattggaaaggacatagcccattggaaaacttgttgtttccagggaacaaaacattttagactattttgaaaatctgtatgaagctacaagtacttgtatttggttttataatctaggtaacagtaattaaaagttgattcttttaaaagagatttacccttcgaggttgtttaagtaaatattttgctctctgttaagtgttcctacttggaagtgtaaatatctgcaaatgtgtttatgtgagtcctctaacttcagaaagagtcctaacctattttcttcaagctcttcatactaaatattaattctctgggaaattatatagtgatatattgacctctacagaatagattcttcatataaattaaactatgtggtttaattttctgttgttactcatttctttagcttgtgagtgttcacccatgtcctgagtgtaagattgtggggctggaaggtttgcattccagcccagcgcttacagcacagcacaagctgaaggccaaagaataggcgattttcagttgtttttaagctttctaggaatgataggttatgatttcccttggcctgtgatttacctagtttcataaaaagtatattttccttttttatgactgacaaaattgttcctagtgtaagttacctgctttttccgaaaagtttgttggtgacttagtttaactattaacccatgaagtctctgaagcaacaaatgcctattattaatcatgtattttgtctgggaaacccccaatgtcttttacttttttaaaagaaatatgtataagtcaatgccagattgcatcctcactttaattttacttctatgaccctccagaattttctcaaaagtagacctgcttattgggtctgaaacaccacactgaaacagatgctgatacttgctagaatgttgacagggctgctttcacagcgtccaaataaaactgacttaaactagatggaggttttttgttttttgtttgagacagggtcttgctctgtcgctcaggctggagtgctgtggcacaatcatgattcactgtagccccaacttcctgggctcaagcaattatcccacctcagcctcctgagtagctgggactacaggcgtgcgccaccatgcttggctaagttttgtattttttggagagactgagtttcgccattttgcccagactggccttgaacttttgagctcaagttatccacccaccttggactctgaaagtgatgggattacaggtgtgagccactgtgcctagcctgtttgtttttcatattaagttctgaaccagagggcagtttaatgtgaccctactccatttggttgttgaggtgtccaggcttcttttatgttgttccgccatatgctaaagtacttgtatgtctgaacatgggttacagcaccatgtcctcattccagttgtggggagggagaagaaagtgggaggaaatttttcccttgaaggacataatgcagaactttcataaatcacagatgttcacattctattttggccagaactgagacagatgcccatgcttagctgcaagggaagttggaaaatgtagcttaatgcaagagttcaaccaacagactcagaagttgctcttgccaaaacgaagaaaggaaaacctgggtattggaaaacagcctctgccatagaaggcctctaccatagaaggcttgttagcggcctcttccatagaaggcctgttcatcatagctcagttcagaatatcagggtcttcctaaatttatgtcatgataattctaatttctaatgtttaagttaacttttagttcacttgtgccttcaggtagttttctgagggttttctggctgtcaatttatttctcacattgttgaaaattatgttatcttctagttgccaccatagaaaattaattatcttgtagttcatttcactaactacaaatatatattatataatgtgtacatatgtatagttatatatatatatacacacacacaaattagtgttatatacatatacagtaatacacatgcttatatacatatatgcacatatataaacacacacaaatcacacaaatgcaggttgagtattctttatctgaaatgcttggggccagaagtgttttaagattttggattgtttcagagttcagaatatttacattatactggttgagaatctgtaatccaaaaatctgaaatgctccaatgagcatttcttttgagcatcatattggcactcaaaaagtttaggattttagagcatattggattttggattttcagatgagagatgctcaacctgtacatgataacatgactaggggtgttttttttaatattttgttcaccaaatctttttttctctcatttgtcttgctgaatgcctttatcatagcttaaatttgaattttctgcttctgaacagtgcttaaaatggaaagaggaggcagatgctggagttgctggtatctgcagccagcttctcttgtcgctgtgttggcttttcttaatttttaagcatatgacatatgactagttgttttttgttttttggttcattgcctgattttggccctaactattccattttaattttagttatcctgcatcatttctgtaggtgtgttttatttgttatttctgggtgactaataaatatatacatttatatattattatatatgaattatataaactttacaaattaaatgagcatgtatatataaaaaataatagcctactgccactctaatatgcaactttgggtatatgaaagttgattctgttttgagtattcatatgctctgagacagatgcctcaaaataagatacctaacggagtacttgctgctctaggcttctagaggactccctggggtgaggattgttcagaaaggaaacacggaacataagcatgatattatgttatggccaactaattagacatctagtcaattgactaacaatgtgtgtgtgagaccctgtgctgggtacagagtcagggaaaagctatcaatcctgaatagccccagtatcttcagaatcaattactgatgctaacaatatcttccagtgtcaaatgagaatacaagatgcacatgactttcctaactaattactatgactcaattggttagtttgaggaggtcttaaatgacaaaatttaattctgtattcctgtatatatagccagtattttataaaagagaaatttggtgaaatggttctgtatgtgttgctatgaattgaaacaaattccagccacttgaaaagattttttaaagtcttatttgcttttctaccagatgtgcttggaagtgagtgaaagtctctcaactagaactgccaggtctttgagtataggtggcattttgtcttagcctaaaataaatactttttttttttttttttgagatggagtcttgctgtgtcacccagtctggagtgcactcctagcctccagtgatccacctgcctcggcctcccaaagtgttgggatgacaggcgtgagccaccaaacctggccaaagacttgtttttatccaccacatctacagctgtttggttttttctgtttgtttgtttgtttttttgttctcatccctgcattcagacaatcaaaatgttttctcctttcaatttccagaaaattacaatgatccaggttcttcgctgaagctaccatatctttgtttcttgtgcaatgataatgtcactgatggcataatgtcttcctctgctagtggagcctaaagcctgatttccaatgaagcttttcagcattgctctctttctaaaatcctcatctgacgtgggctgtggtttgcttttagagtttgcttcagagtccacctatgcaattctcagagcactgccacagcatgttctgaaatcagagttgggtctgtttagtctagcaacctcatgaggaccccgtcttatgattgcatgaactctcctacacagtagaaatgtgtatttctataggcgttacttaaatgtttgcaaaggagctgtgtttcagttttccctcttgtaattaaatgctgacatattttgcaattgaaaataggagaaaataggtaggtggcaagacggtgttcaagaataattctttcctcgggcaaaaaccactaagatcaagattccatccccctgattcttctgcaaaaaaatgtaggacaaaaccatggggccttaaaatgaatgagaacaataacatcgaatcaataataatagctatcatttataattgcttatcacgtgccgggccttgttcttagtactttacagtgtattaactcatcgtttcattatagacaatgtagagagcagatattactctcattttcctttttagattggaagctgaatcagagagaggttaagcaacttgcaccaagcctcacagctgtaactggtaaaggtgagggtttaacccaggcagtcagattgcatataaacactcaagaagctgcattttatagccgtagaagagccatgctgcattgataaaatgtgctccttagcaggcgctcaaatgttacaccagctcactggcttgagtaatcagtcctcctttcactggttcagttgcatcagacgagtgttcatttttcacacccagcaaccactctcagttcttaattctgatgaatgcatgtcaggctatggagctttcttgtttctgaagaagttgttggctcaggattcctattttcttgatagcattcaagggatcctgcaaagtcagcagagtgttctacaagtctgctttgaggacaaacttattgacatgtaacagattctgaagatggtgtctggacattttcatgccatttgttgctagttgagttgaaggaatgctgttggcacctacaacattagcatctacatcctttgctgtgtcataaaggatagatgtaaaatacaatgaactatgaaggagggaggtaggaagtatgacatcatattctctcagggcataaagcagatttacagtgtacattgcacatttaatatgcacaaagcgcttctggtacatatgaggttaaactatataaaataccattttggtaagtcaaaaacagtggactagcagaaaattcatccacacacatgcacagatatacacagactcatgtgtacacactgcactgtgtaaaggtatttatgttgtcactttagttaataaaacaaatagacaaaggtcaaaattacccagtggaattgggcttaacctccaaagaacaataaaaccttgtatgactgaaattagaaagtggtctgaggacccattcttaaaattctatcagaaaagaatgttttacagacaaagacttgcttttggaatactatgcctgctaccatattctcaaggcaaaattcacacattgaaagaatgagattcaatacgtgtgaagtttttttttttttttctatgttcaaatcgggagaagggcattatccaaagctgacatattgaggtttctttgttttttgttttatgccagtctgctgaaggcaaagccttttctcttggcaggctgatgccttttgcaaggttttgtggttaggggcatgcctgtgctgcagtgatgtgagcagtttatcagcaccatttttctgacagaagttactgaagcatggtgtctgagtccaccaaaccattacatcttcagttacaaggcacttcactaaaagagtggctttggaatattttgatcctaaacaaagagcttgttgttaaagtggtgttattttgttttattaaagaaatgagggcaaatgctcatagaaggtggaaactcactttcagtttgggggaaatatcccttaaactagaagaggtatatggaagaacttgacaccttactaacaggtattctgtggattttttgtgtttgcttcatatggcttaatatcacttcactctgcagaattatggaatgtaaggtaatacacatcaaagcagcataggtaagacaattggatcgagaattagcaaatgtaggatttaggcttatgtgtcccatttaaccatggacttttctggacttttgtctcctcatctgtaaaacaagtgattcaagaccgtgaactggaagatgtgattgggtgccgggtgtctgttcttaagagactctagaatttctggtcgctgaactggcagaggaacacacaaagcatttgaccttgctcccatctttcataatgccttgtgctgcccttggtatttaaatgaacatgattctactgacttgctgtcagcgggacttgcactttgggctgctttccagcagtggggaaggatttgggatgattcatcgacacttgctttcccagatgcctctgcttctgcattctactgtcaaattgagcaaatttgccaaagtcaatgacagattttatttgttccttgcaaacaggctaaggtggaaaaacctaaatagatcccaaaatacatagaatttcaatgtgatgtatattaaccagaaaattctgtaaatgtatagattaagtattagttatcacttgtggcatattatcaataatcaaaatgtactggacactattttaagtgctttccatgttgcatctcatttaaacttcatgaccactctatagtgtggtaactatgattatccctagatgagaaaatggagatgcggaaagactaaatgacttgcctgagattacacgtagccactcagtggcaaagccaaggttagagtagtcagactctagtgacagtgcttataactgctacattgtccctctctttggctaatggtgctccctacctggcttttgaggcaggaactctcaactcatagccagagttatggagtctagccctaggatgtcaacccaagtcagaagaactatttgtgtgcaaactttaccatgtataagatgtgaaaatagcacatacatgattagaatcatacttgcttaacttttaggatcttatttgactaaaatatttatgtagctgctttggaaggtgcatagctgtggcacagatggctagctgatcactaaaaatacacgtgccttttcatggcatagggtaattgctggcaaaagtcttctcaacgagggactacgtgaccatttctcaccaataaaatgtgaggagaagtgatgtgtgtcacttccaggatgacatggttacagagatgcgctttcctcaccatcctttccccagtccctgattgaatggagggaattccagtcatgtgctgaagattatggagccaaagacattggagcctgagttcctcaataatcacctgcaggaaagccatctgaccatgaatacccacattggattttcacatgagtaaggataatcttgcagtgaattaaggcactgagttctgtgttatggcagctaactagtgccaaaagtaaaaagtgttgttgctttcatccaggtggggattccatgaatgtccagctttttacaatgctgagtaagtcattgaacttagcagtgtctcctgttatgttttgataacgaaaatttttatttcatggcctcagagcaatgttttccaactaggggcaatattgtccttatctccaaggaacatttggcaatgttgggagacatttttggtggtcacaacttatgagaggttgctactaacacctagtgggtagaggccagggatactactcagcttcctagaatgcacaggatgtactcttataacctaaaaagcatctggcccaaaatgttgatagtgctgaagatgagaaaccctgtcttaggagcatgtttgcagccacagatgtgagcatctttactgcattcttgtgacatgtagttcaattcaactggtagagaccctgtgtggcccctgctctgcactgggtcttacttactggatatatcattcagggcacatattctttacaacaagactgttttggttctcaattcgcattctgtggtggaataaacattgagtggaatagaaaacattagctttgggcctggcgcggtggctcacgcctataatcccagcactttgggaagcggaggcggacggatcacctgaggtcgggagtttgagaccagcatgaccaacataaagaaaccccatctctactaaaaatacaaaattggccgggcgtggtggtgcatgcctgtaatcccagctacttgggaggctgaggcaggagaattgcttgaacccgggaggtggaggttgcgatgagccgcgatcgcgccattgcactccagcctgggcaacaggagtgaaactccacctcaaaaaaaaaaagaaagaaaagaaaagaaaacattagctttaaagctagatctttctgttaacaactatgattcgaggcaagttaataagcccctgcaagcttcacttccttcacctgtaactgagaataatatcatctgcctcatagatttataagcattaaattgaatggtatacataaaacatttactataatcactagcaaataacaggcattcattataaatattcttttccttccccggacttcataaatgtgacaaaaataacttgttaacaagatttgaaaccatacagtggaataaactagaaataatttactgagtgccataatgtactgatccatatttttatatattcttagtttattggtcaagtaaataactggtttccagagaaaaataaaacactcaagttaatattcaactctaattcatgccattccagttttaattccagtcacttcttgacaaagaattggtgaaccttttgacagccgtgacttagagaaatgttgctatcctgaaacaggtccaaattctttcttctgtggtcattctggttctatgtggtcttttgttcttttatatcctaggctagtctatgacccagacctacctctgccccatgcttttccatgcatagctgcttatttccttgtagcaaggtcaacatgccattgcagaacattctcaggtgctcttggcaattagtcaaagttcagacatcgagtttcagactcttcataaaatttcctataaccatacctatttctgtaccaaattctattgacacagattaatgcaatgctaagtcttaatgaatgaagctctattcatcaatacttgaactacaaatgtcttttcctattgcctggggagtgtttgctttgctccaatgctataataaatgttttcaaagtggccctggaagttgatggaaaaaataatatttttataccagtgcttgtaattttttggtgacatagtatacatagtaaaaatatatatgcagaccatttggtgctggaggtgacaagctgggactttgtactcctgatgtctcacccagccagggcaaagggtcaatatctaggcagagctgtcacaaccattcacgacatgctgacttgttgaggaactctattctagactgccttggtgatgaaccataaaaatgacaattttaacacaaagtcctagacacctccctctaacccacaacctcctaaatagttcacattaaagtcttgtcctttatttttatgttttgtgttgttatatgaattgtcactttatctttaggaacttgattcatgtttcatgattttccctgttggctacacttgagggtctctgtgtatacatgagtagatctggtccccacccgtagttgctctcctcctgccttggagattgcttggtgctcctgcaatgtcttccttcaagcatgatgcacattataattattctgttctgcttcaggaatgcatatcaagttctatgcaattaatgccattacaaggcaaatacagagctcttcttggcatctccaggacatctgtaacgctgcagaagcaaagcattgtagtaatttatgtgacttaggaacttcttttttctatgactgttaaaatggcatttttaaatgaagaagttattagccaagaaaaaaggacttctggagaatagctgactgcctacaataacgctggtcagggaggatttgggttctggcgctgcttctagaggcacgttgatcacagcagggagggattcagaagggtgaggcaaggctggtagagcagcaggatccagtgggaacatttggagagtctttagcctggagaaaagtagtccaaggggatgcgggaagctatttttagctctctgaggaagaattcctaaaactgatcttgaattctgcggtcaacagaatgaagactaaagggtaaaaaggtagttacagaaagaaatgcaaacaacacatttaaaaattggttactagtgtcaacagttaggtgttatcctctcagaagattatctgtgtaaaccgaaacctacacctatatacgtacatgtttttaattatgcgtatatatttaagaatagttttacaaaaatgggattatggcccatgtattttccttaaactgggaatcaaatttggatttcatataataaagacattctatgaattgggagtatctaggattctcagtgggatagtattaccagtggaacagactgcctcatgagtagcaggcttgccatgagtacaatagcataggccagcaggtctccacatttagtattcatgcacatctcctggggatcttgttaaaatgcaggttctgattcaggaggtctgggctggggtgtgagatttcaaacaagataccaggtgatcgtagtcctaggactacactttgaggaataggtgtctagcttaacatccctagggatgctagaaatagattcctgtcttgggatgggataaaataaccctaaatttccatataacttgaagtttttatttcatcttgattttaactttattattttctatggaaaagaatgttgattatataggtgtttcatttactgtctcaccattattcatcattttttttcttttctatttctctcttttctccagtatagcctacaacactgtgatgataactatgattataatctttccttttttaatgttcaaaacaaatattatagctcttctactggttgcttatatctttatttagaaaaacatgtatttacatattttaggatcatttctatatgtctaattcagttcccatagtaatatgaagattatatttaaattatgcccctagtaatgctaatagaaggaaccagaatgaaaaataaaaatagataataatgactaagaccaattaaacacaacttatgtgataaacattgctttaaggggtttgtttatatgcattaaattatttaatccaaagtgtagacttatggaataggcattatttttatcccattttattgataaagaatgtgaggtataggaaaattaaataattggtgaaagtcacccagtttgtgtggtagaattggaacttgaacccaggcagtctagcttccaagttgaggatctcactgttatagccatattggaacaattcattaggatgatgcaaaataagatgtcaccttatatcaaaatgtgagtttttatttttgtaccattatggtaccatctttgttgataatttagtcttttaaatagacatttagcctttgagagcatccatgctgcattttgtaatttctaacttatttattgaattgccttagacatatggaaaatgttggactatcctatttaaatttcatgaaataggccttaaaatcgcacttgtaagatacatctgaaacttttataaattcataatgataatttggtgacccttgctaaactagaggacactgggatttcaatgttggtttgaacaatttagaaacccttttgcaaagttacaccagggttttaagcattctctcttaaaagacaagtggaaataagtgatttcttttccaaagcggtttatcttcttggtaagttaactatgtttaagatttagtattcactccttaaaatgtttttctataaggaaaatgaaaaggattgattaaatgagtaagagtgaggtcctggcatctaaagttgtagagttgtccatggcaaggacatgtgctcatttcagcacattatgaccattgctggagacaaggatgaacagagagggatgaatgatgcccagaaaggtgcctgtaaccaagactgtggttctcaggaagccagagacgtccaggattcagagatgtgaaggcagtggcggtacttccggactgattcacagttctaggaattagcaggggctgtctgtttctatttcccaaataccttaatttattaaattttaataatatgtaatatattctcatacttccaaaaatataaagggcaggattttaacaatgagaggcatgttaattattcacggagttttgcacattcataaggaaagcttagaaagccctatttctctgtgggaatatattccgccagtggaacccagcattataattattttgttaacattaatgggaggaatgtcttttcatcgatacccttttcttgaagaaagcattaaagtgttctggtaccaagataattgttaaatagaaagggcacctctgatgggtattctctgtttcattgattctttttccatcttgtgatgttgatgatggtcaagtctaaggagcagagctagaacaaagatgaacttaaaagtcatcaataaagaggtattttttacccagctgtcagaacaagaaaagttttttgtacaatttttaatcttgtatattaacggttcttctttaagatataatttatatagagtagaatgcacaaatctcaaatataacactcagtgaattttgacaaatgtatacacctgtgtaaacacagcgtagattaagatagaacatttcatggtcccagaaaattctcttgtgccctcttccagtcaatacctctctctcctacccctgcacgcacataaaatacccagtgatgactattatcttatcatccagcttagtttactgataattacctttcatttaggtggaatcacatggtgtgtttttgtgtttggcttctttcgtgcaatgtaattttttttgagattcatccgtgttgttccatgttgcattcctcttttttattgctgtgaagtgtttctttgtatgactttaccacaatttgtttatctactgtccagttgatggacatttacattctttccagttgtaagctatgatgagtacagctgccataaacaattttgtacaggtcttctcatggacatacattttcatttctcttgggcaattaactaggaagggacttactgagtcatggagcaggtgtccattttgctttattagaaacctcagttttctgaagttctgtgtcactttatatctcaccaggagtgtgggagagaacaaagatggtcttgatcacagtggtatgctgtcacttgctcctcatgtgggcacttccacagtcttatatatcactgagctggaaagaggaggagagaatgataggctggggacaggaggcaatggaattatggagatagtgtattggagaggtaattgatcctgcccctgccagcaagaccagctcatttactcccagaactgctcctcagcccagcgatgcctgacaaccttccattaaaagttacaccatgcagactggctgtgttacagaattaattccgggactggctttcagcccacttgcaccttgacctcacctctgcctgttttctctcacgcccagttcatgtgtattcatacagcttcacaaaaactctcttctgttgttggtgatttttttggttgatcctcatcactgaaacttcatagtcatgagctgtctcttacaagatacataactttgggccagttacttaacaaccccaagtttctgttttcttgtctataaaatggggatcagaatgctatattaaaaagttaatggggccaggcactgtggctcatgcctgtaatctcagtgctttggggggccaagatgggaggatcgcttgaggtcgggagttcaaggctgcagtgatcacaccactgcacttcagcctgggcaacaaagtaagaccctgtctcttcacaaaaataaataaacaacttttaaaaagttaattcaatcattaatgcctataaagggctcagcacatagcatgtgctcagtaaacactactgtaactcccagcacaacccctcctgttgtacttcctacatatgattggttttccaactctctaattccccttaattgataattctagtgaaataccctcctgggaacggacctaggaattcctgcctaggcctctgcctttccaaggctcatcctcaaaccgttactctgagacaattgtaatgaaacaagcaccatttatacggcaaactttaaagctcctgctagcttgagctggggctctttggatttcctgtttcatattttccaggatgaggattcgattttaaggattacatgctaaaaatagacctctattatgcattttcaaggattttaatatattgttaaattctagtttttttttgtttttgtttttgtttttgagacggagtctcgctctgtcgcccaggctggagtgcagtggcgggatctcggctcactgcaagctccgcctcccgggttcacgccattctcctgcctcagcctcccgcgtagctgggactacaggcgcccgccaccacgcccggctaatttttttgtgttttttagtagagacggggtttcactgtgttagccaggatggtctcgatctcctgacctcgtgatccgcccgcctcggcctcccaaagtgctgggattacaggcgtgagccaccgcgcccggccaaattctagttttaacacatagagtacctcccctttaaaaatgaattgttaccaccggccgaatacctaaacactatcattctgtgctcctgatgttcctgtgatctcatggagtctagggtgcctttcccagtctcaacagagaggacttcatgagccctgggtacagaaaggtcattggttttattttaaacagtgtcagctacctgctgcccactttgttccaagctcttccttggccctgctattttcaggcaagatgcccatgaaccagtacagctcttcacactcatcccttctgcctcttgctccagaatcatgcttgggtatcacaagcctacatgtggaccaacctcctttcccttgttccaccatgcccccctcccatatacacatcacaaagcttctcttccccatgccttcactcacattacccctctctggttagtacttcctcatcaccaacatgaaatcaacaggtactactcattccatgactttgctgctctcctgtacagccaaactccttagaaagtcttcattaacttctctaaaggaagactttgtagagagtcttcactgtgcttcccctcctcccagtctcaccccaacacactccattataactgttgtccgctccactctgctgaaaagttgccaatgtccaacatcttgtcattccttttcatgaaacttgaccccttaggctcactttatatgcctgatgggcctacttcttttttgaaaggtgctcttctcctaacttctgggacaccggatttgctgttttttcttcctggattcttttctctcagatcttcatggggatgtttcttctcatcatggatataacccctttgcagaggccctcccagtcccaagcgatcctaatcaaagcagcttccttcaacctttggcctgactttctacctcctttatatttttaatagcactaattatatctgaccttctcatttatttatgtagatgttaacatttcatgtggaagtttgtaacaattgcacatttgtcaataatgatccctgacattcattaatgacctgctatgtgctaattctgtcctaaattagctcgtctaatattcaaaataatgttatgaagtaggaactactatcatcattttttgtatgtgtaaactgaggttcaaagaggctagataacttgccttgattccaaagctgtaagtaacataatgagaattcagacccatctattttgatgctaagatctgtgatataaatcattgacagaaaaaaaaaaacagtgaattaagctgtgtccccatgctttctaggggcacaaagagagatttggtgagacagaacatctttaaaggtaccacctggagagaactaacattttgtttgctctggagtgttgagaatttaaaggtttggctttgtgatggctcaagcagtaaatagatcacacacagtgaggaattcatctcattttgcatcgagtgtgcaaagcagtcataaatgatgaagaactgcattgtgggtcttgtgtaagtcttagagtaagactataaatttctaaaacttgaagtttgtaaacaaaatatacattagtttactcattaatgaatttataatctaagatgaactgaaactagatcctagttaaagcaaaataaggaagatgcactggtctatattttctttcctttgactttccacttaatcattaaagccatggccttcatggattattggcaagggaaagcagattgtaacacattttgcagatagagagagcaggtgtttcccacctgttcagttccatctccaggatgaactttgccttcattacatgaatccagagcatactctcccaacttggtagtgctcctgtgaactgttgatctgttactggcaagcctgaatagcccggcgcaagagccagtctgcctagaaaccctgaactgagtctaacctgttctcagcaaatcccatctctgcctctctggtgggtcctcacggcacccttgtctgctgcctattacttcccaaagaaagagacaaaaaaatccttggaagtgttacactaatgactttacatataaaacctctctcagaaatgtctgcatttttctggaagaggatgagtagaaaggtcaataggtagccccacagaatgaaaagtattattcagctacagtagatgctgggggccctcaaatcccaacagtccaataaatcccatccacatggatatccaaggaatagttttatacaattggattataagtcaagtatttgagggagaagctgttcactaatcgcccaaaacattcctccagtctgcacctccttctcattcccacagcgactctcccttttaggatattgttgttcatctcctagtccacttttcaaacttaatgtgtgtaccaagcatgtggggctctaggtaaaatacagatcctggctcagcaggtatgagatggggcctgagattctacatttctggccagcttccaggagatgccagtgccattggtccaccaaatcacactttgtatagcaagatcctagcccagaactttccaaggcagaggaggcctcaaaatcccctgtaggcatgtgaaaacacagatctctaggccctatggcaagatattctaattgagtaggtctaggatggtgccccagaatttgtatctttaacaagttatcaggtgatgctgctgctgatggtctgggaaccccactttgagatccaccatcctagattattgtagtagcccgtgacttctctctgtcacctgtacttcattgtttcactgtcaccagaattatcctttaaaattctaaaaataattactttgtacatgttttaaaaactgctaacgattctcaatggatcatttagtatacttccaggcttcttggcatgctgtaacacacagttaggtataagcagccctaagaagtttttcagaggcctgcccctctggttatctcaatagctgctatgagatatagcccacccagttcacatgcctgtatttatcagtgatttagagaattctttatttcaggaacttgtgcagaccacaaaagcatttattgaaaatgaataaacatatactatagagtgatgtgtgcaaactttttagtaacctgtaataagacaataccaagtacaaagccatcatgctttgtaggatatcaggattggctgacgtactcgttgacatcaggattccactgtcaacctccatgtccaatgtcttgagaaagtggctagtgtccagccagagagaggctgttctgtcctgctctgacctaaccttcacattggtctgccctatttttgttaattgtcttctgtgggatctcatgccatttcttttccaggcagctagatgcaaggattatttgttgttgctgatgtttgttttgttgggggatcttagtcctaattctttttctttgaatctgtaaatacttcaagtgcagtccataaagaagcttgacttgcctccagaatgcactgccagatgctagcttccagctttactaaccaacccgagagatggattttgtgggtttgtttggtctcgcagtttgtgccaactgggcaccgtgtccttagtccaccctcttctttgcacacaagtacaaaagggaacattttattctgctgctttgggtgggaacagtcactttatttatggggtctgagctaaaatttgatttctctattgcatggtgcactggctttatccatgtacatccacatcctttattattttcccatttcatgcgcaagttctaggcttctcatggtgttccaccctttgtggcttcagccttcctttccagcttcacctcccagtactgcagcccacctgctccagcgattccctgaaaaagtcacgtcccctgtagtatatctgctcccggtgctcaccccaacaggattaagcccacacttgtaggcctaaccagatcctaaactcaatcttgttgagcccaatgaaaatcaggtggtgtaactcacaaaggcaattgactttaactcctctaggttttgcttttgtctggttttcaaaggaaagtgcatgagggagcagggaagtgtttgctgcaagcaaatgtttgaacgttcaggacagttaaaagaagaaaagatataagcattggtgaaagtgagcacaatagatgcaaatttggcacgctgaaaggaatttttgccccttaatgatctgtgttttctttatgcagcataacccgaggcaattaaaggcaggaaactactctaaccaactggcaattatgttttagtatatttggtacaatgcatactcgctctccatattttcagaatttttgaaaagtaaagaagcttcaaaactgtcaaagttggctcttctttcactcttcacgaagccttagtaggaaaaaggaaagagctgggctgtttgctctgggtccttttatgtgctgacatggatgcatttgaaggatttgaaatgtgctgcagtttgaaacttgggttccttttactgtttattcttttttgtgttttcacccattggtacccttgattgatagtgtttaagtcaggggacaagccgggggtttagaacattgatgtcctcagcgaatgaccctaagcttaaaagggagcccaaactcatcaggcctcgtgtttaaaaatagtttatttttgatgatgttcatgtgaatgagccatagtcctactcctcagggctgtggaatggaaagccttgagtagcaaatgatcgtagttgcctggccaaaccctctttctggtccaggcactgtcctccagcagtcacaggtgctgccctgggcattgtaggatgttcagcagcactcctgcacttgaccccttagatgccagcagcatcccaccagggtgacatccaaaatattcctagactttgccaaatgcccgggactggagaaagggcaaggtggaggcaatgggaggcaaaattgcccccagttgagaatgattgatctctagggatcctgaagatgtgctgggtgaaagccaattctcttcctaagctgatccaggcacaaaggagagcagaggcatctgcaaaatgaaaactacattcttttaatgatatcactctttcctcttgacccaattttggccagtttttagaaaatcacatcttcctcaagcatctaaactggcagaagagagaagatgccacagtttctgctttgaagggtccagtgaggtttggtatggtcctcacataaagtaaagaggccaaggatatttgtgttttacgttaggtcttggcaaggtaaaaattataagagaagttttatagtgtaccagatttctatcgtgtttttaaaaagaaaataacttattgaatataattgccagacaaggtgaagatagtaaaagtattcaggttgtcaccccaaactgcaaagctgactaaactaatttcaaccttttcctgctaacaaacttcacccttctgtgttttctctccctccatttttgcctgcctgtacaactcaatcctttgtatttactcatgatgaaaggcctacatgcaataaagaaaattaagcaaacctgattttcaaggcttgagtaatttaaaaactatgattttgacattttaagaatgttatgttgaccttgttcttgatcagtcatgagaattaaatgcaggagctttgcaccaaagcaaggcccctagcttaataaagatttaatttatactgcttcctaacattctctttctttttagtctacacagctcacattgtaccttttctcaaagtaatcatgagttataatttaaactgttaaatacacactgccttaatcttgtattttgttgttacattaatcaaggcagtgacaagcaaaattctgttcgaggactcttaacctgccttgcaagaaaagtaatgttcactttttaaatgagccattaaataaatccattgactttttgagtgaaaagcctctccctgtcccaagagctcaaattgcattcaacagttgcttttggaatcccaaagagagcagcaaatagtaggagttatgtctctggaaggcttcttgagttccaaaaggcgatttccttcctctccagaaggaaatcaaagaggaaataaacaggaatcatctgaaagataagaagtaaatgcataactcagtggaaagctagctagctagacagatagaaggaggatacaggctttctagagaaattgggattttaaagcatttatggagtggagaagaaatgactgcaaacaaagccaagtgctaaatatagaaactatggaaataaatagcccatattcccaggatagccttagctttgatgttaagcagcaaagcagatccagagggttcctgtataaagctataaacagaaaagaattaagaatatgctgattgagagaaacaaatgtggtttaccttgggaattacctctgtattgtgctatttatggaataaaagacaataatgtcatagcaagcactttgtataattaaagttctagagtttatagtggaaaaaatatgcagtccattgtcttgaaatgtttatttcatattttgttgtaagggagctttacaaaggtaagtgccttattctgacagtgctagctaactaataaagtaatcaagaacatgaactctgataagcagacctgaaaccaaaccagaaggcagaaaagggaaagaacagactccaattggagctaggtgatatgtctaaaataaatttcatgtgtgcctttcttttatatttccttggatccattttaatggaaatttccattagtggggcaacctatgtaagtaattgatagatatacttaatttatttgctgataagttgagaatatagccatattaatggaattggaattgtcaaaaaatattgttggagttgtccatgaaaatactcagtatttcttttagggctacttataatgttactataacaaccaatgaatggacttaggcctgaaagataaaatgaaacataaagatgatgaattttttaagttaaattttttattgaattccatgaagaaatagctctgaaatctcaggattgctctagtttcaagtggttagaagacaaaaagagcctgaggcaggagaatggcatgaacccgggaggtggagcttgcagtgagccgagatcgtgccactgcactccagcctgggtgacagagcgagactccatctcaaaaaaaagaaaaaaaagaaaaagagcctggcttcttaagaaaccaggtagtaagatggtaaatcatgtaactggagaaaatgattgggagtattttggggaaagatatggttgtgaacactgcaagtttctgttggggaagaggtgtttgtagtcatgactacaaagatgaccctctggaaaagtctaggaagcaggtcataggacaattccagaaagaaggagaattattcaatcagtgactccactgtctttcagcaaatgcttgcctgattactacagaacatgcaacttttgctgatacaaacatgcacgaaggaaggtacttcctctagatagagggaccttgtgagtaattgaccttgtggctattctccccttatacttcccaaagtcccttgcagctagatgtgcctctgagctaaattctggcaaagaggtgtcaacaaaaacctgtgggaatttggggatcttttcttaaaggtggggacatggggtgcttcttccttccctctttgctgcaggctgaaatgtagccaatatgaattgtgttggagcagccctctctatcatgagggagatgctgcatactggggattgagaggttgtcagagagaaaaagctgagacccaaacaattgtgtgatgcaggcctaatggcctggtctcctacctccaggcttctttcacatggaagaaataagtctgtatcctttctaagctgctgctgttttggcctttttagaaacttacagctgagcttaaacttaactcatacacatttactgtggttataagtagaactaaaaatatacttaactcatatttagcagttggttttatttcctcagttcatactgaaactagagcaatgtctttgcttaaaaacagaaatcaaaatcaatcaaacataattgattgaatacagattgcaaagaagtataaaatggaattttggccctcaagtggctttcttcaacatgaagaaacaagacttttaaaaaggtatatgcatatatttgtatatatatatgtatgtatatacacacatacatatatatacacacacacataaatatatacatatctacatatacacacccatgtactacacacatatacatataacaaaacaatattaaaaactccattgtgtaatagttcaatagaatcagtggtgcacagacaataaaatccttgggaattcagaggaaacaactgaaagagatgggagtttgggcagagaacctggttgtgaagattaaaaggaaagattagacaggtgacaagaagaggaaataggacacaatgaatgtattgtcagtaaaatgaaagagttttaggttgatatctcagtatgacatatttacagtcacaattcaatataaagggtcttttgctagcgttcatgtattttatctggtcttaatgaaatgtataagtgaccatgatagacctcactgttccacaggtagtgttttcaggaaaattgtgcaattagtgtctgaatttattctatgaagagtccttacagtttgtctccaacttgcagttctgtggtcaaaggagctgtctgaataattgcagtatagtaattgtgtctacagaggacataagcaaagcattttgcttaagcaaaaacattttgttttgttttggttttttgtttgtttgtttatttttgctggcagcattgctagtcaagactgaaaaattagggcatttaaaatagtggagtaagaatggtggttgttgcaggggagctgagtaagatagagcaatgtgacaagcaggtcttataagactaggtagaagatcaatactctgagaaggagatatggaggggtcagaatggtctgtggaaaaagtactgaatgtggtccagttgaagaggaagagaatcaatatattaaaaaagacccaaatgaaaaaaagaaataaagctgtctttatttgcagatagcataattttctatggagggacaccaaagagtctattaaaaaaaactttctagaacaaataagtgagtaaagcaagatgcaatatcaatgtacaaacgtctattgtttttctatgttccagaaatgaacaattggaacttgaaatttcttttcttcaacttttattttatctggggttcatgcactggatgtgcaggtttgttacacaggtaaatgtgtgctatggtggtttgctgcacagatcaatccatcacctaggtattaagccaagcatccattagctattttttctgatgctctccctcgcctgacccccaccctggataggccccagagtgtggtgtttgccccacagtgtgtccatgtgtactcatcattcagcttccactcataagacagaacatgtggtgtttggttttctgttcctgggttagtttacggaggataaaggctccatctccatccatgtccctgtaaaggacatgatcttgttcctttttatggctgcatagtattccattgtgtatatgtgccacattttcttcatctagcctatcattgatgggcatttgggttgattccatttctttgccattgtaaatagtgctgcagtgaatataggtgtgcatgtatctttgtaacagaatgatttatattcctttgggtgtatacccagtaatgggattgctgagtcaaatggtttttctgcctctagatctttgaggaatcaccacaatgtcttccacaatggttgaaataattgacattaccaccaacagtataaaaatgtggaacttgaaattttaaaaattactgttaaaaatatcaccaaaaaatgaaatacttaggggtaaatttgacaaaatatatcaaggagctgtatgtggaataccagaaaactctgataaaataagttgaagaaagtctaatgagattgggtgatatttcatgttcatggatggaaagatttaacattgtaaagatattaatttttttcacattgaaccacggattcaatgtaatcccagtcacaatcccagcaaactttttttatatgttggcataattgttgcaaaatttatatggtaatgcaaagaactgagattagctaatacaaaactaaaatggaagaataaagttagagaactcatatgatttaagacttactataaagctacaataatcaagaaagcatggtgttggcaaattagatacatagatcaatggaaaataatagcaagcccccatatagacccagataagtatagtaaactgacttttttatgaaagtgcaagaataattcaataaagaaaggatagtcttttcaaaaaatagtgctggagcaattgggtgtccatatgcaaaaatatgaacttagagttcatactttacaaaaaaaattaactcaaaatgagtcatagacatatatgtaaaatgcaaaccaattaaacttctagtagaaaaatagaataaattttgtacaatcttggatttgtggatgagtttttagatacaacaccaaaagcataatccatgaaagaaaattttgataaactataatttgcttaaatttaaaacttttgctatgcagaagacagtattaaaagaatgaaaggaaaagacatagactgggagaaagtatatggaaatcacattgtgataaaagaatagtattctgaatatatagagaacccttaaaacccgacaagaagaaaataaataatgtaaattaatatttggcaaaacatatgaacagatatctcaccaaagaaaacatacaaacataacaaatacccatatgaaaagatgctcaacatcatttgtcataaaggaaatgcaattgaaaaccccaatgaaatatactacacactattaaaatagctaaaattataaaaattgatgatactaagtgttggcaaggatgcacagcaacagtatctcttattcattactaatggggttgcaaaatgggtataatgaaatataatacagtttagcagtttcttataaaactaaacatactcttaccacatgatctagcaattgtgctcctaggtatttacctaacagatttgaatatttatgtcccacaaaaacctgcatgcaaatatttatagaagccttattcttaataacccaaaactggaagccaccacgatatccttcaataggtggacagacaaactgtgatatatacaatggaatattattgagtgataaaaaggaattagctttcaaaccatgcaaagacatgtatgaaccttaaatgcataatgctaagtgatataagtcagtctgaaaaggctgcatcttgtataattccatttatataatattctaaaaaaggcaatgccatagagagggttttcagattagtggttactaggggctgtagaggagattgaaaaggtgaagcacagtgaatctttttaggatagggaaatttcttttgtatggtgctgtaatggtagttactatgcacgtatgaggtactatgcatttattaatatactgtgtactttgaaatgtacaaatgtactatgcatttataaaaatctatagaattttgcagcacaaaaataaactttaatatattcaaatattagaaaattatttaaaacatcaagagaatcccaggatggaaagcagattgtgacaaataatatctatattataaatatagacaacaaccttactgaaggcaataagggaggaagttgctaactgaagtaactggaaatgaatggaatctgtgaaactgaaagcaaaaagaatggttgttaacaactgttaacagttctgagaccagtattcttatatactggaattgaataattagttggatggctgacggtggaagcaaggtttctcactgttggagcaggtagttatagagcaaaggaaaggtgctagaatgatccatgtagacataggctagaattgtgacatcagtgtgaactcatttttagcttaatatacatgcagatggatgaatatagaaagttctgtgtgtatatacatgggtttgtatacatacctgtatttccaaactgggttcttgaagaggacctacaaacaataacactttggtatcaatgagcataaccagccccctgaacttggtttctagtgccgttcttcaataaaaggaactagggctcttggagaaatggctgattctagagctggggaagggaatttacaagattaggctggagcatctaacaatgccaggaagcaagaaagtttctcaaaggaacatatggaaccaactaaaagacttctcaatggtcaaagctggaacaatttaagcaacaaaataaagatgtgatattagattgcaactcaaagtataaaataagtatccataggccacattattataaatcagtcattgaatgaataaataattgggaagaatacacaattctcccatataggataccaaataatttatgtaggagcataactgccttctcttaagtgtgggattcacatagcaacttcctgcaaaaaaagcacaatatggaaagaggggataaagagtaattgtgatgcagaaactgacaaacactgcctcagtcagctgaccaaggataatctcatcagtattaagtcatgttgatagtaggtacctttgacatgatgtgatgaaaatggcattttacctctgtggtctctctcccgaaacccacaacttcagcctaatcatgagaaaaacatcctgtacccatattaagggatattctagaaaatacctgactagtactcctcaaaactgttaaggtcatcaaaagcaaggaatgccaaagagacaccctaagatgacaggtggactaaatgcagtatggtgtcgtgaatgggctcttggcacaggaaaaggacagtaggtcaaaactaaggaatatcaatgaagtatgggccttagttaatattaaagtatcaatattggtatattagttgtatcaaatgtatcatactaatgtaagatattaaccatagggagaactgcctgtgacatacatggaaattctctgtacaaattttctgtaaatctaaaattattctagaatagaaggctatttaaaaaaaaaaaaaagaccaaagctaaacatataatcgtggtggcctggggctggaagtgaaggttagagaatggagagttattgcttaacatgtacagaatttctatttgagaagatgtaaaaggttcctgagatttatggtggtgatggttacacaacaatgtgaatgtacctaatgccactgagttgtatacttaaaaatgattaaaattgtaatttgtatcgtgtattttatcaaagtaaaacaagtatttcaagaaaaaaactcaaagacacagaaaactagagaagagaaacatcagaaggactaaaaacaaaatctaaaagtggaccaacaacaaagcaatgggataggaaggaaaactgcgtaagattcacagggcaaaacacttccattactagaacaccaggaaagaaaacacctgtttagaaatcacagcaaataaattagtactcacggttttctctttacttcgtaatttttaaattgtacacaccctcttccaaaaaccttacaacacaaggcaagaaatacaaaacaaactttttgtttattagtaaattaaatactgtattgaatgtggaaaaacagaacaaaaagtggaggctctgatacactttggccccgaatactggccctctgagcggaggagagttggggaaatcagatgttatattaatggactggcatttagaagccaggcattgaactctgtttattttatatattattttaaccctcacaacagcattatatgctagtactattatttctcactacagagctaacatttgagatcatggttttctgtcaatgacttgaatttagtaacagtgaaaattccatacacataggaatatagcagaattttttcagtaaggctgtaacgtttaagtgaacttagctgatcctacatatattagagaacgcttgctataaattcatgggattctgtctaccaagtcagagaagtggtttaaatgtgttgatgtatctggcgtattagagtctacagtcatgaaatggaaccctagttgtacaactcattagctatgtgctgtcaaattacttaacatgtagagatctcagttttaccatctattaaatggggataaaacaggttctttgcttataacattctttttccttttctaatatcccatgtgcttgtgactttctatgatcagagatagtggtatttgtcttaaaaaaaaaaagaaagaaagaaaaggtcatttaagccccatattatttggagatcataggtacaataaaaaataaatgccagagtttcaatagcttaacacattaaaaagtattcctcatttacttagaagcctagtgtgggtgtttttgatataaggtgattttcttctacctggtgatttagggacttagactctgtccaatctaacagctccagtatctcctagggtctctctgtcctctttaaaaaggacacaggagaaagaaaaagacctgaaatgaccctcgtctcttccattaaccttccatttgtgagaactattcatatgaccctccttaaatgcaagcaaagggtgatgtgaaatgtggctgtattcaggcagcaatttccctgtaattctttgaactgtgtaaggcaaagtgcaaagtttggtggcgaatgagcaacctttgccttaagctctgtgcgagcccagtattgctgaactgtgctaacccactcacctgtatggagagaagagtagcaccattatagtaaggactcctgcagtaatcaccaagtataatgggggcacttaaccctcagcttttttgcaccttaaatggtttaataataattgcaacaaaaagtatttataaagcattcgggaatgcttataagggattaaagtaatattaaagaaatcactagagtctcagcattaaatgatttttaatgcaacaaaatctcatcatactgtattttttcttcttagctttaaaaatagacctgcagaatagatatggtataaagtgagactccatagtgtccagaattcttttctttgtatttgtactgatattctctctctcttttccagtgtatcaacttttagttatatattttgttcaaaaataacatctgatcatcataaacatcaattatttaaataggataacatgcttcttctgagtgctttaaagtaaacttgagtgtttataagtaagggaattattaagaagaaaccctggtatatccacaagataaatgttaccagtctctaagagtgcgtctcagtggttctcaaacttaaaagtatatcagaatcacctgtaggatttgttataatgcagattgctaggtcccaacctctggagttttcagttcagaaagtctgggatgtgggccaggaatttgtgtttctagcgagtaaccagatgatgtgatgctgctggtccagggaccatactttgaaaaccactgatttttctataaaatgatgctgaagaaggtaaggaggaaggtatcaaatctacgcggtttctctgaggttggactacttgatgtgtcccagcttttatgtttaaaaaaaaataatgccgaaagacatacagtgcttaagactcaggttaatttaattccataatcatacggcataatagcaccaattttggtacatagagtcttctgtacttaattttgactgacccacatagagcaaatgtgatttatctgacttgaaattgaaaacccaaataagctaggttgtgaaacacagtaggtttttacgatggggcctataaggagacctatgaattattagagggatagcagtggttaggctaaaggtatacagagaatacgttgcaaagatattaaggaaaataagaaaattatggaagactttaaggaaaagcactaaatatgagttcagggcctgagctaagtggattttcaaaaaaatttcctgggtatttactttcttaatacagaggaagtaatttggaggaagatttatttttaggttttactttcatctgagcaagaagaaatatattgtgcaataatgaaaaagcgatctatcttcttgggtgctcaaaacctatgttaaggatttatgaattatttattaagaaaaattatacacccagggatggtgaccctggtcaatatttaagcttcaaaaaagataatgaaattcagtttttctaaactgtagaggataaagtgttttatcataacattacaaattgtggaatgaatgaataaaagtcacagtgggttcttttttgaaagtctggggctacccggaatcagcatataggacccaacttcaaaaggtgaacaatgatattaaccaataatgtgtttctttgaggaaatgatctgaagcaaaaagatacctcacagaccagggaggtaatattcaagcaactaaagaagctaaggactatttcatatgactatcttgcccttggtgagaaatcctaatacagtgattttttttctccactatatttacaaaggaagcataaaaataagaatgttggctgggtgtggtggcttacacctgtaatcccagcactctgggggggccgagcgaggaggatcccttgagcccaggagttcaagatcagcctgagcaacatagtgagaccttgtctttacaaaataaaaaaggaaaaaaagaaagaaaaaagaaaaaaatgagaatgtctggatttgaaggaagaaaaggattcaaagaaattctgccctgcgttctgctgatggcagttttatttgagaactcttgcactgtcaaatgtttcttagttcatcgcccaatttaatatttcagaaaagtcatccaaggactgttttcttttgtggttttctttctggcagcattctatggcttctctgttcttggagtgttcttctgccttgacaaggtaaagttcatgcctaagcatgtgcagaaactcaaggtcaagtgcaccactgagcaccttcagagtgaatttttaggggataatgttgtcacaactgtcttcatcatcaaacagcaagccttcatgataggcctgccagggaggtggccctgccagcctgctgcctcttgtccctttcccagtttacactgttatttctccatcttgccctgacttttgcccaataacagcaagcctttgggttgaacctagcatacctgctttccttgtactccagggccataagcttgcagagctaccgtggtggcatggcccatggtttgtcctgccccaacttttttgtttttgagacagagtctcactctgtcgcccaggctggagtgcaatggcatgatctcggctcattgcaacctccgcctcccgggttcgagcgattcttccacgtcagcctcccgagtagctgggattccaggcaccctccaacatgcccggctaattatttttgtatttttgtacagatggggtttcaccatgttggccaggctagtcttgaactcctgacctcaggtgatccacccaccttggcctccccaagtgctgggattacaggcgtgagccaccgagcccggcgtgtcctaccctgccccatcttgcttccttcctcctctccctttattccttccttccgttctctttagaaatatttttgatatgtaacagaaaaatatagaacataataggaaaaagtccctcttaaatgttttcgcttttattttttgcattatcccaataacctgtttcatttatgtactttgtcttcagggtgcaattgtatgcaatatgtttggattctctgccacttgcactaacattctcttgccttaatgctgtctcttcttatctactcattttctgtttctcatcctttaacttttttaaagattctgtgcttctcaccaacatattgcaataaactgcactgtgcttccacctttcaggctttttaatgaagggagtaaatttaagaattaacttgtttctcatgaaggtcaagtcaaggatgtgttggaagaagacagatgtcttctattagttgttcttctgtattttgtttcaacctactgttctgaagcagcaatagtagtaaacataaggccttgtaaaagagtttttacacaattttttttttaaatctgtccccatcccacttttggtctgacagtgattgctttttacttactccctctctgttcataaagaggtagtaatactaaattaatagtgtttgtgaaaattcctagaaaaaatgttattcacataggatctttttaaaaattatccttattcatttttaagtgaggttttaatgaaatgataaaatgaattatgtttatcaactttggagtagagctttatatattctgttatggatagtttttttattattttaatgaaaggaaagtcagagtagggggtagaaaatagaataaacctttaccaagaagaaagtaaaataaagagaatatgaacatatttctttttagctatgggtatgacaaaaatgaactctgatttggagattaggtaaactgatgtttttcatagcttttatttatttatttttagtaaggaatatttcttttttaaaatcaggcactgtctctcacgtgatgatgagaaaaagcttttgggaaaaccatttgcacgttagattacagggtatttatgcatatgttttcccagtagtactcactatattttaaaacctgattaagatgacataagataaaatgtggcgtattgtgactgagaacccctagtctcgaatgctcatatttagtgggtataatgatgaaaactattttcgaggacatttttgaaagattccaaaaacatacagaaatatatctaaagccaaaaaagtaagtaatataaaaatatgagtttaaaaatagtaatatgtgattcagaataatttcaagtttaacgttattttctaagttgattatttgcaaatgatagctatttggatcctgttctctgaacaaacccagatgcaaggggttgtatacaagtgatttattaaggaagctacttccaggagacatcagtaagagagtggaggaagcaagacatggatggagaagagttaagtaagggtgagctttcaggtgaagtcccaacctcaacctaagctactgaaagctgcagagcacaaattacacctcgagttgcttctcctgcatctgtcagacatgaactatcagctctctggggagatctagcatctcaggcacttcctgctctctacacatctgagtgaagtagctccaagaagccaaaggtagtcaaaggctgcaagtgtcacttgtttggaataaagctgatagacgctgggggatgggtgtctagccagtaagggagcctagcagggaaccaggctagtatcaatagaggttcctgcaggagctttaggcaaacttcctgagtaattggaaaatggctctacattgattttttttcaatcattcatagttcttaatatgaacagctagcttcgttttgtgtacatacattagtgttgagattgatcaacagtcgaatgaaaaggagagttcctttctggtaaaatttacgcacttaggcaaaacctttgggctgatttattgattgactcagtgaatgttcttctcaggaaaattcattaagcatgatgttcccttttagacatatccagctcctacccccacaaattagcatcggaaaagatttggttgaattccgtctgtcttgccagaaagccaaaagcaatgttaagaagcaaatcttctttgaaagggaggggaaaaaagaccacacttgtcaacttaaaatatctcattttggaaaatagattaactcattacatattcacaatgtcttatgagaggaaaaggtcatcaaaatgcaaacctttggcagaaaaaaaattgtgatacattttggaataaataactggagaaaatgagactatccagatggatataaccaatcagctactaaggtaaagcaaggataaatgccgtctatctatacttcagaaaatatggaagtcaccagatatgccatactgtgtgatgagagagaaaagaaaatacgttggttgagaaaatacgttggttactcactcaaatgtatcatgcacagggctgaatcaaaacatgtggaaatcagccgagcatttttagaacctctccttgacacagtctggcctctagggcccaatgtggaaattgctgctttaatctacagtgatattagagctactgataagcacagtagtctgaagaagacttctcagttttattagtagttttctcattgctcttagaattctgatgcagctactttataactggatgtaggaagcctgtccaagtgtcagaatgccctacccgttctagacctaattagccttctctgtgggcagccattgtcttcatttaatatctagggcagagattctcaaacttcagattgcatctgaatcactgggaggtgaatcacccagcacagattgtcgggccaccccagagtttctaatttagtaggcctagagttgaaccagagaatttgcatttttcacttgttcccaaatgatgatgatgccataggtcaaaggaccacacttggagaaccactggtgtggagaaatgaaggcatttaagtcctataagcagataagtgatggattcaaatattatattaaggtaagattgagggagtagtttgcactgccagttaaaaaaacttggctggctgttcagccacagtgaaataggtgtaaaccagagataacattttagatgattcaaaggggaaatctggctacatttatatcatctggagttttcaagtggaaacagcttgtttgcctgatgaatctatatcattccatatttcttatcaaaagaccttttatgaaaatcagattctatgctcacccaaaatattcaggaagatagtttttagcacttatgaaactatttgcaaaatgatggatgctgtttctagttaatctgattagtctgaaatgaggaatttagcttatcacaggcagtaatagaaaattgtaacaatgccatctttatcatcatagttgtgattttttttaactctgagttctgaatacatgcaacatcattcattcttcatccataaagatgtggagaattcctctgtgagaagcctgtaatatataagaactggaaaaataaaacacgtgctataaagagccaatatatttctgaaattattcatctttaaatatatatagattatccatggtgattatggaactttttctcaggtttttaatgtcaacctaataagttgacatctcgttaaaatgaaggcagttactagcatgttaaatctgacctgtttttcattcatcatttgaaagaaattacaaaaatatatctcttaatataatgtttcctagaatccagaagcaagtgtggcagtttcttccctcagagtcatagatgcatgcaactataccataaatactgttacaattaagttttattcattttacctcttaataaagccgtggtgctatacatataattttatgtttagctgcatttaactttcaactttggaagtgttttactcttagatgagcgtgtaggagtttctaaggttgctgaagaaggaagtaagaatgagaatatttggctattgcacaaccagccaccaaactatctcacctggcaatctgcaaggaataaattaactgcatatctgctgatatagttcacattgccttgtgcagacacagcctctgaaaactagtgttatatttatttatcatgattattttttcatatacgtgaaaaaagacttaagtggttttctttcatttatgttacacaatactcctgctaccttatcaatatccaaaatttttagaaaaaagtaagtttggggatatgtggattactttttctattatgtacatagggtcaatgatcctgggcaattaacatattttctctgggacttagtttcctcatctgtgttctctttccgttcccagttactatgattctattatagtaattgtttctgtttgggcacattcaataatggtgacagcattgcagtcatttttatgcagggtgggtggagtgccaagatacgtaaattcattttcattcctttttaattagttgcattagaacttggaaacaatggggttagtgtattagttatctattgcttcataacagactaccacaacttaatggcttaaaacaacaaacatttattatctcacagtttcagtgggtcagggtctcacctgcttagggtatcctaaggctgaaatcaagatgtctcctgggctgtgttctcatctggagctcaaattcctcttccaagctcatttaggttgttgccagaattcagttccttgtggtggtagaactgatgctcttatctcctggaggtcttcttctccatagtcagtacacagcacagccagcagattagtgtctctgctgcttcaagtctcttgcttctaaaccctcttttgaatggcctacccaagatatctctcttttggctaactttatgttgtctgattgggaaccttaattacacctcaaaattcactcactcttgctgtattacataacataatggtgggagtgatagcccagcacctttgccatattgtattggttagaagacagctgcaggtccctctcacactcagagggaggggattacacaaaggcatggaaaccaggagacccacatgagtgtggccatcttagagttctgcccaccaaaggtaggcaaaaatgcagagatttgtgaggaaattgtgcagttgaccaacagtagtcaatagtagtcataactatctctgttagttttctcatctgcaaaacagagaaatatgataattaggtgacagtattattgcaaagactaatgagataatacatgcaaattttgttttacaattcttggtatgctggttctccattataaatacatacgattattattgctgttattattaaggatattatttgactttgccacctttagtgtgggaacctttaatctcatcaataataatttctcagtttttattttatttgtaccgagcagactctttagattaaaaagtgcattaagagagattgtctgggtttttttggttcggtatcttcctgtatactgaccttggctcccggaagaatgcatgaactccagaccttggtggattccttatctccctaggacaggcaatgggacaatgaaggaagcaaggaaataaattaaaaatgaaaagttatcttccacattatctgccgcattcatatacttgccaataacattgggccaaatactttggaagtaggtccagggataacattcagactggagaatggaaccgataatatccgcaggcattggatcacccactttttccccaatttatgctatgatatttatgagagcatgagagcatggaaggtaattccaactgctgtattaatgaactttcagtgtccctaggttgcttgcaaaaataaggcatcttgttggttttctgggtaaagatgagtctgacttgtattttatgtactgtgttcctgttaggtccaaagtctgaaatacctaacatcttcagcagggtgtcattcattcataaaccaggatgaaatacagcctctgtgctgaactttatgtcaaacactatacaaatcaggataaaagtccaaggtctttttgtcgagggattcacaccaagtggtgaaaccccatgtcaattgacagttacaatacaacctgtaacacatgaacgttttcattgcttgtcccatttcaaaggttgatcctatttttcatttacctataacacataaaagtgaaaattagtttctctagaagttttctctattacttaggttttaagtttttatgaagtagctatagagttccaggttttcagatctttttctttttctttgtttatttacattccttgtgtttcttctagatgctttacctaacaacttttaacttttctgctaggatctttcccctttcacttagaatgggaaatcttgcaagcataagaatttctatatattcagtactcgctgcttgctaagtggagatcttaatttaatatttcagttggtttagcagcagccgaacgagggagatgttgctggcatctgcacctgtgtttgacagatgaggatacaaggcatgcatgagcatctgtagcaacttgtttaatgctacattgataacaagtgataatttgagggaagaacttacattttctgcctcctacttctatgaaatttgcactatattaaatctaagtgtgtttaaataaagaaagccagatgtgtcatctttctcttttctctgccttggttcttattgatgacctatacctctcatttccattggtgtttcttactgtgggtctccactgaaagttgtggaaataaagatgaaaatcatgcctaggaaacaaaggaaaagagagaccaggtggcagacggtgcagagatttctttgagaggtacattgcacagatttttcaccccctcagaagtggaataaagttaaggaacaaagaattgagtctaagtccatctgcttcttgttaaatgaaaactatttgttaaaatactctaaaatcatttttttaaaaaaattgtgcattttaaggaggtttggcagtcagtaaaatatattaatgtattctacttttggtaaatcaaaatagaccaacttaatgactataccacacatgtatgtggagatatacataatcacaatgcacacacccagccattaatatcttctctgtgaaatgtttatgactgtaattgctgttctgattatatactgtgtgaacctgaaacacattattatattgggtgactaatggaattcaataacaatgcacagaaattgggattctggaaagagttgagttttaaactgtatttcctcctcagtttgaagtggatttcatgtctcatctaccacacagtatgcttatggctgatggattgaaatctctctgctaaatagtaaacaaccaagacaattcagtcttctcttagcttgcctgctttctcgtcactcattcaaaatatttttgttaaatacccaaaacccattaattagtaataatgggttttgagtattttgttaaatacccaatacctcagtttgtttaagagtttaagagtttctgttttccagctttgtggaattcattatttctttacgactttctttgaaagagagatcacagggtatatatgtggaaaacttgggtttgagtgaagaccctaaaattaattattcatgtattcagtcaataactttaccacactaacaatgcacagaaattgggattctggaaagagctgagttttaaattgtatttcttcctgagtttgataattaacatcttcagcagggtgtcgttcattcacaaaccaggatgaaatacagcctgtgtgctgaactttatgttaaacactgtacaaacagagataaaagtccaaggtcttttgtcgagggattcacaccaagtggtgaaaccccatgtcaatagacagttacaatattattgtaatattactgttaattcacttttatccatgctgttaattcatttttatccatactgacaaaaagagagggcatatccatcaatgcatcagtggatgcatctgaggtcctaagagtgtgatctccaagctttgcagggtgtcattaatggccttggaaataaagggttcttttagtacatgcctcgtttaatgattccggtaggttcttttagtacatgcctcctttaatgattccggtaggttatgtgactttaggcacttcaattcctttctcattgttggatggacttcaaggttagagagaacaaattttaatttctttattccacttttctaaagatgtatctaatgttatgaagtataatgcaaaggttctatgggagaacatctgtgacaaacaaaacgatttcaattgttgcttgagtttctgaacacctaggacatttgcttggatagaatatgatttaatcctaaagagaaattattaaaatagcagtcgatggcatttgtcattcaatagttttttcttcagctaactctcaccactaggcacacttttacattcagtaagtgtaatatttttatttgaaagttcccaatataaagaaatgatagttatagattcttcatattaacaaaagtaatgtattgctttatcaatgatattcacatgaaaggccttataacaacatgagtgagtatataattagtgcttctcaaagtgtggtcattggaccagcaacgtcagcatcacctggaggtttatttgagatgcagattctcaggcctgcctcagactcacggaatcagaaagtctgacaggtgacacggagcaaatctgtattttactaagcttttcaggtgactgtaatgcaggctacagttggagagccactgatacggaaggtatgatcatacccatttaatagatgaaaaaattgatgctcagtgtggtaaagttattgactaaatacatgaataattaattttaaggtcctcactcaaacccaagttttctgcaatatacactctgtagtctctctctcaaagaaaggagtaaagaaataatgaattccacaaagctggaaaacagaaactcttaaactgaggaagggcagaaagggaccatttcactgctttattgtaatgagttgttaaaactattgtcacgagaaaattaacctagaaaaagttttaatgatacaagaaacacttttgtggtcatgcattgggttcctcattttctttttagtggcagagagaaagggatgcagttaaactccagaggggtggctgtggtatgttaatagaagtgggagacactatttgaatcatcgctttgtagccaaatgagttcatggacggcatttccacccaggtcttccccacgccacattacccttgatgacagtgccctgcggtggttttcatgcacacagttggcgttaactacccttccgtggcttggggaatgaatcctggaagtggaatacagagttcattatctgtaatgcaaaagtctatataatgatgcctgctaagatctagttctttgttaattcaatttgggctttgcgtatataatcaaacaagttatgtttaagtctattgtttcttcaattgggaggaatttccttaaatagaaaatattacgggccgggcacggtggctcatgcctgcaatcccagcactttgggagcccgaggcgagtggatcacttgaggtctggagtttgagaccagcctggccaacatagcaaaatgccgtatgtactaaaaatacaaaaattagcagagcattgtggtgtgtgcctgtaatttcagctactcgagggctgaggcacgagaatcacttgaacccgggaggtagaagttgcagtgagttgagattgcaccactgcactttagcctgggtgatggagtgagactctgtctctcaaaaaaaaaaaaaaaaaaaaaagaaaaagaaaaaataaaagaaaatattactattgattaggtaaaaatactgtgtgtgagagatatatttttatcctatatagatgtaaaacatcatgcaacatatatggaaaattacatcaaatgtaaatgttagtgttttataaataattataaagagaacacccatgtaatgaccactaaatcccaaagtgattgttgctaatgctccatatacctctgtgacatatcctaagtgggttgtagttttctgcacacaattcctgcttctgtgagtttctacccgcaatttcctctctctgaaaccaccacccaccctcccaccccgatcacacagttataaggctggcaaactctgtctcatccttgtgtactggctgaaatcatgccatagctctctgtagccaatgtctgtagggcactttgaaatatttcctttagcatataatatttgacttgcttgtgaactcatcgaaactgggatcttatctttgtatgttttagtttctcagtactagtgtatacctgatacattgtaggcattcaataaataatgctccagtgaattaattactggcattttcacttggataaacccctcaaaccaacatctccagaatgcactatcattttgcccaaacttctgagtctcagtgtaggaaaggtggaaactgcagcgtgttttatgacttccctctttccttcagtcagttcctccattgccatctctctcctctttcttccaattacttaccttcattttgtctctcatctttcacctctcagatctccacttatttcccatcttctagattaaacttcttcaagcttgattcccttactgtttctcctcttccagcaaatattttggttgtcattgctgtagagatgaagaaacctggacatatgcttgacttactcatgtctggtttttccaccgtttcttcacagagggttctataatgtgcattttctgaagtgaagcattgaacatggttgagaccattgttttctaacactcataaggtaacctccaatattgtggatggtgtggccttcggggaactgtggcaccagtcactctgtattgcaaattccttgctgggttgccacctgtcacaccccaggggtttgggagaatttccacagggtcagacacagcatgaaatgggctaaggaaccctctaaaatggggaaaatgaaacttacaaggtcagagtgagcaagagcagagacccactgtttcctgtccacccttcatctcacagagaggtgtgtcaggagttctgttggaccttctgtgtgggtttgcattcgaggagtgagacttcacctttaatttggcctttactacaaggcaatcttaggtgcagaaaaataatcagaccagtttgcaccagacatttggaactggcagcagctgtttgaagaagttgactaagagcaaaaggtgctggttcttagggagcttggcctttaagaagttacagccactcctatccagaggttctattggcagctgaattaggatgcagtgcctccttccgggagaaggggattcgatgctccatccaacttgctcattgcccaggaatcatagttaggacatctggagtcactttaagacaactgctcactgcaccacagtcctacctggctggtggtagagtccactgtctaatgcagcaacctgtgtgtgtcacaaacctcatggctcagtctccttagccagacatttagggtttccattctttggccatattcctttctgatgtcatctctcatgacttcttgtcacatgttctgtggcctagccaatggaatattgaatgtcctcccacgtgaatccgcttccatccttctacaataccactgtacctgcacctttgcagttcttccctcctggatgcttctctatccttctccctacctcctttccccgcaatgttctctgtctctaagtgtctaaaggccacgaacacctcaaggttcagccaaaacctctggccctttctcatctaggcatttgctcatattttcccctccaactgggaggaacccctccccaacttctttttttccaagcttaatgatttctcataaacttttctctgagcccctaggaaaaaaactgtgttttctttgctgccccccaaccatagtagtcaactttaaaattggcattaacacattcccccttgtcttacacatatacatttctttacactcctatttgatgacaggtccatccaggaaagcaatcatatcttctatgccttattccctagagtaacttgtgtattacaggtgttcaatgatgggtaatgattaagtgaaaagatcagggcatgaggtatgtgtgcaaaaggctgggggctgtcagaggcagattcgtatctctgccttggccagataagctgggtatgtatgtgagccgatgggagcatcccactccgtcctcctccctaatctttctctctaccgacataccctcataccctcacctacgctcagtgactcccaggattatattcaaaagtaagaacaagaagacctgattcatcatgatttaggaatggcttgtaggatagactggggacataaccacacactttttgctttcaaaatgtataactgagcagttagcagttagctgtcttttgtttccaacctaattcaattgagaagtgatataagaggaaagaaatatcccaactgcagagaagtcttcagtcaagtctcaagataatttttttaagtgatgtcaatgacataaaacaaagaggaaaggtctgtgtcgttgcttaacgatttcacgtttttgccttccaggagacagagctactggatctcagccttgtcaaagatgccagatgtgggagacacgccaaagctcccaaggtaggaggttgagtgttgtgcatgcaccagatgctgccttgattgtttggctgtgtcacaatatcaattaattgccccaattaaaagtttctatgttatagatgttgtaaaacacaatagccagtatgccctaaacactttcacttttattaaaagacggaaacaatgaacaaatatgtgggctcttggacagaggggcttgctttatgtcctctaattttgcctttgtttgaaaaaaaaagacaacgacaacaatgcccaagttactgggtaattctaaatgattaaaaagtacttgaaattatttgaaaaaatctttgaacctcgtaaacatatgggaactaaccgttagacatgatgaatagaactcccatatagctgaaatgctctgcaattgaaatgattccatccacaatgccaaaaggtgtatagtcttaattctgcaaatgttactagtaaagatcagcatactttgggatgaattgtgtgcagtgtcatttgttttggtttgaaaaacttactgaagaaatattcaaagaagtgtttgcagtctgtttattttttgaagataatttttaaatattggatgaagaacataattttttaagcttagatgatctggtaggatatagtagcaggatatgttgtcttgccatcaaagttaaaagctattcttcattttatttaaaatttagtactttacatacttcatttctggcagagagggtattggcaaacatagaagtacagttgccatttaggagctcaatgcgtctttccatacttgatataaaactagctattttctatttgagtgtcttcccacaacttttgttttatcttttaaaagtcaaaattctttctctgacattaaaatgatctgttgctttggagatgcaagaaaaaaaaatcacctggaataattattcttcagaggcgtaaaaaggcagtaggtgccagcatattctatgacacagcaaacacacggctgctgggttttttaattttttaatttttattttatttgctgaaagggttaaaatgatctatggtaaaatgtaaaaacaaagatttttgaaagaaaaattagaactgtattcaagaaggcttctataagtgtttcatatgaaactaatctgttatttacatttatctccttagtaacatggaatttcaatagtttagcctctcagttttgtatcagacttactataattaatgctttgttgatgattcaaaattgctcacagtttttagtataggaaagaatattttttcttcttcccccaacaacatttcagccaaatttcatataagcctgttagttccaagaactatattgataatgcagctatgaaatttatctttgaacctaagtttattggcctaacttgcaatttcaatatcgatattagttttaaagacagttgccgacactgcatcagagccctgtttgtccccaggcattgggagtcaaagtgaattctgctgccacatggagggtttctttcaggcttgaatctgtctcttttattgcggtacacagcttgcttatcagttaagtgtttcgtttatggatgtggtttgataaatgtctactgaacagtgacaaatgaacagcagtagggcctgtactgtgctcagctgataaaccactgttagatcctcaaatgcttctcgtgaggatggatttttaacacttagaatactctgactttgtcagcttttctccatcagctctttcttggagggactgattacttcctctttgaattatctatgctcctggcttcctttttttccctcctatttattgctgatgttcaagaacctcactctcctctaatattttcaaagcctggttctattaaacattacctgtgtggctttcctgagactccagcttcttccttgttggctaaatggtgaagataatgataataataagtacttgaaatggttgctataaggattaaatgaaataattcattaggaaacctttagcacaggagttctcaaatttaattgctcatggaattacctgggaaactttcaaaaatgctgatgtgtgttttccgcctccagaaatgctggtaccataagaatcaaattgatacaggtgtggtgtgggcatgatggatttgaaaaacaaatttgcagcaaaatttgagcaccactgccttaacttactcttggtgtacaataagtacttactaaatattagccaatattgttggtagtaacattgttgcttttgttatcactaaaaaattcaagtcagaattgtagaaagccacttttcatttcactcacttaatttggaaatgtttatgtcagcaaaagggatcagaggaggggcttatctcaaagggggttgtggattgacaggcaagaaagaagttgctattactatcagtttaaaatcttcaaatttccagagaaaacctcagctcaaattggacaaataaaaatataatttattgaaaatgactggaatgtattgaaaatttcagcggaattgccaggttcaggtgaagtttcattccactgctcagttaatgtcaccaaggactaggtgcctctttttttcatcagtatgccatgcaaggttctggtaggggttctgatatggcttggctgtgtccccacccaaaatctcatcttgaattgtaattcccatcatccccatgtgtcgagggagagaccaggtggaggtaattgaatcatgggggcagttcccatgctgttctcgtgaaagtgagtgagttctcacgagatctgatggttttataagtgtttggtagttcctcctgagttcactctctcctgcttccttgtgaagaagatgcctgcctccccgtcgtcttccagcatgattgtaagtttcctgaggcctccccagccatgcaaaactgtgagtcagttaaacctctttgttttataaactaccatcttgggaagttctttatagcagtgtgagaacagactaataccgggtccttttccatcttcaggttccccttggatgctaccctctgcacaccacccttggcagctcctggcctccccacctaacagtgtcatatggggtggcccaaaagagagactagctgcctatcagagaattgtatcaggattacagtataactaccttgtagaagaaggtgtagggcctgcaagaggaaaactagaccattgagttggttagaacaaaagcagcaacaggacttagagtagattaaaagtataaagataccaggataaagtgaagaaagcttggaaactggggacagaaaggcaatgtaacaaaaggacagattgagtgcaagactttctgcgggggcttatagaccataaaggaaggaagaacatttgtgaagcagatatttatcaaaatacccaggcaccccacaaatatttatctctatattcatattatttttgttttttacagcatctcattacataaaaattcaagatctggttgaaaatgaactgttttttgtgcctgctgtgatttgaaataacatttacaggaaatggaaaagcttccatgtgttaccctgtttatgaatttaaatgtcaacccccaacacaatacatgaaattccagatcttcttttctgtatataacctttgttcaagttgccagttttaaaatttcacattagagagaacttgggagatctttatccaaatgtaataaccaaaagaaaaacactgtatcctttgaaatctaaaaggtgcttactttttttcttgctctctctctccctccttccggccctcccaggtttgtagagcacacgtaagggcaagatgctgtggtatatatatcttgtctgtgctatgtacatgtactttctgggtcgtcacttcaaaaagatctttgcttttaaaaaaagtgtttatcactgcggcctctgatctattagtagttcctgacccatcagatccattcagtggctcatgtgcagctttcataaaataaaataaacttgataagagtggaaaataatcttgtcttgtacagaaaaagttgttttttgaaacttttttcatgtatgtgactgtatgttctgagtcacagcataaagtgtaatttttactgtgggcaatacatatcggagaagttttaaaaaggatgctgaacaagatcatttcttcagcctcatgattctcagcatgtattgagtgcttaggggtatggaaaagtggggaaagtggagatgtgggttcaagtgccagctttgccattaacaggcgtaaggaagttgtgctgtctgctggcatctctacttcctcatctatgaaatggggcatgggatacatggttttaggtatgtaagttccgttagcccttgattccagcttttaaattgagaagttaaacacccatgactttccaccttacagattgtaaaactgatgttgaataagtttacataacctgaaacttcttacctccttcatcatgcaaaccaagtgaaccaaaaaaaaaaaaaaaaaaaaaggtcacactctagccaaggtaaggtactatgccaacaaaaaggattaaagacttgtgtcaagcttctttatgtgtggcttctcaaaagcattctaggattgcttttggacaccacagggagcgacctcagggtcacagaggctctcccaactttagtacatgaaaactgtgtgctgccaacttccagctctcaagaatgcacgcagcaatgtcattgaaaaatatttttatagttacacaaaataaactgcttgtcatgctgatctgacaactagtttattctattggtaaagggcagttatttcagatatgtagtattaattttaatgtagattctttgtaaatatctaggccgcaattaaattctaggttgtatgtagtatcaccagaatcacataaggtagattagagtaaaatcaaattttaaaaattgattaggcttttctttcctaatctctacataaacatgatagcttttttacttcattctttattgattcattgattgattgatattcaatgacagaagtcattgagtgactctttctgccaggtactgttacaggtgctggaaaacagcaatgaacaaaaagacaaacagctatgctgtcatatagcattttatttaagagtgagaaagtggtggtagttttaaactgggtcttaaaaaagaaaagaaatcagccgggcgcagtggctcacgcctgtaatcccagcactttgggtggctgaggcgggcggatcacgaggtcaggagatcgagaccatcctggctaacacagtgaaaccccgtctctactaaaaatacaaaaaattagctgggcatggtggcaggcgcctgtagtcccagctactcaggaggctgaggcaggagaatggcatgaacctgggaggcagagattgcagtgagccaagatcacaccactgccctccagcctgggcgacagagcgagactccatctcaaaaaaaaaaaagaaaaagaaagagaaagagaaatccctgatttgctgtgttggctgacttcctttgggcaactatttccatggaggcaaatttcaagctaccaacctgatgtcattgaatgaagagttggaaggcaatacacaccatgtccagtagacctatcagcaggttccagcacctcatggggtaggggaaacagataacagataagtcccactgagaagcataaagcgggatcggagacctgagaaaatgagtgctgggaaggggtctgctgctttacagagccatagtggggaaaggtgtcttgataggaggcagttatatgagtagagacatgaacttagtgagggagagcattcctctttgccggggatacagcaagagcaaagcatatttcaggaatagaggaaggccaatgtggctactgtagagttcagaccttttaggccatgaaaatgacttgggcttttcttctgatggaagagggaaggcttctgaaagttctgagcacagaagtgatgggatctgagcttttgaaagttccactggtggctgttgggagtaaactacaaaagagagaagcaagcagaccaactaaatggctgctgcagatatcctggggtgatgatgataactttgcctgaggtggtagctagagaggtggtgaacaaagtgacataatctgaatatgttttaagatagagacacagggtttgataatgtattggatgtgaagtatgagcaaaagaaaagattctagaacaactattagtgttttggcccagaaaattgggagaattgggttgccatgtcctcagataagaaggaaggaagagcatatttaaacagaaaaaaatccagaatttggttctggatatttaaatgttgagatgcctgctagacttttacctgataatgtcaggacagttagacacaagtctggggtttagggaagatgttggccctggagatacaaatgtgggcatttgaggctcaaatcctgggtgaggtctcttaaggaatgtaggtgtaaaagaaagaggtttgagatctgagacatgggattgccagcatttagactttgaggagacttggaggaaacagcaaaagagactgagaatggtatatacgtaaaagaatagaaggcaggaacttgaacagacacttgtgtaccaacgtccatcgatggatgagtggatatacaaaatgtcgcatacacttacaatggaatattgtttagccctaaaacagaatgaaattttgacacatgctacaacctgagggaaccttgaagacattatgctgagtgaaataagccagacataaaaggacaaatatagtatgactctgttcttatatgaggtacaggcataccgcagcagcattgcagatttggttccggaacaacacaatacagtgaatattgaaaaaacataagtaatacacattttttggtttcccactgcatgtaaaagttatgattacactatactgtagtccattacatgtacaatagctttatgtcttaaaaatcagttatttttagacataattttacaattaaattaaataaaaaatattttattggtaaaacatgctaatgatcatctgagtcttcagcaagtcacagagggtcttgcctcgatatcaaaggctgctggccattcagggtagtgattgctgaagattagggtagtggtgacaatttcttaaaataagacaacagtgaagtttgcaacatcagttgactcttcattgcatgaaagatttttctgtaacatgaaatcctgtttgatattttacccacagtagaacagtagaactactttcaaaattggaatccatcctctcaaaccctgcttctgttttagcaactaagtttatataatattctaaatcttttgttgtcgtttcaacactgttcagtgtatcttcaccaggagtagattccatttcaagaaacgactttctttgctcattcataaaagtaaccccttgtctgttcaagttttatttatttatttttacttcttattttgttttatgtttttaattttactttaatttctcggatacatgtgcagaacatgcaggtttgttacataggtatacgcatgccatggtggtttgctatgtctattgactcgtcctgtaagttccctcctctcacctcccccaccccccaacaggccctggtttgtgacattcccctccctgtgtccacatgttctcattgttcaactcccacttatgagtgagaacatgcagtgtttgattttctgttcctgtgttagtttgctgaggataatggcttccaacttcatccatgtccctgcaaaagacattatctcattactttttatggctgcatagtattccatggtttatatgtaccacattttctttatccagtctatcattgatgggtgtttgggttggttccctaactttgctattgtaagtagtgctgcaataaacatatgtgtgcatgcgtctttataatagaatgacttatattcctctggctgtatacccagtaatggaattgctgggtcaaatggtgtttctggttctagatccatgaggaatcaccatactgtcttccacaatggttgatccaatttacattcccaccaacagtataaaagcattcctatttctccacagcctcaccagcatctattgtttcttcactttttaataatcacgattctgactggcatgagatggaatcttactgtggttttgatttgcatttctctaatgatcagtgatgttgagctttttttcatatgtttcttggctgcataaatgtcttcttttgggaagtgtctgttcatatcctttgcccactttttgatggtggtatttgttttgttttgttttttttcttgtaaatttgtttaagttccttgtaaattctggatattagacctttgtcagatcggttgattgcaaacattttctcccattctgtaggttgcctgttcactctgatgatagtttcttttgctgtacagaagctctttagtttagttagatcccatttgtcaagcttggcttttgttgcaattgcttttggcatatttgtcatgaagtctttgcacatacctatgtcctgaatggcattgcctagattttcttccagggatttttatggttttgggttttacatttaagtctttaatccatcttgagttaatttttgtataaggtaggaggaagggatcaagtttcagtttcctgcacatggctagccagttttcccagcaccatttatttaataggagatcctttccccattgtttgtttttgtcaggtttgttgaagatcagatggttgtaggtgtgtggtgttctattccattggttctgtatgtctgttttggtaccagtaccacctgtttcggttactgtagtattgtagtatagtttgaagtcagctagtgtgatgcctccagctttgttctttttgctcaggattgtcttggctatacaaggtcttctttgatcccatatgaaatttaaagtagttttttctaattctgtgaagaatgtcaatggtagtttcatgggtatagtattgaatctataaattattttgggcagtacggacattttcatgatattgattcttcctatccatgatgatggaatctttttccatttgtttgggtcttctcttatttccttgagcagtggtttgtagttcttgacaagatccttcacatccctcgttagctgtattcctaggtattttatgctctttgtagcagttgtgaatgggagttcattcatgatttggctctctgcttgtctattgttggtgtaaaggaatgcttgtgatatttgcacattggttttgtatcctgagacttggctaaagttgcttatcagcttaaggaatattggggttgagatgatgtggttttctaaatatagaatcatgttgctgcagacagagacaagttgacttctctcttcctatttgaataccctttatttctttctcttgcctgattgccctggtcagaacttccaatactaggttgaataggagtggtgagagaggccatccttgtcttgtattggttttcacagagaatgcttccagttttttcccattcaatataatattggctatggctttgtcataaatagctcttattattttgagatatgctctatcaatgcctagtttattgagagtttttagcatgaagtgatgttgaattttatcaaaggccttttctgcatctattgagataatcacatggtttttatcttggttctgtttatgtgatggattacatatattgatttgcatatgttgaaccagccttgcataccagggatgaagctgtcttgatcgtagtggataagttttttgatgtgctgctggatttagtttgcagtattttatcgaggatttttgcatcgatgttcatcagggatattggcctgaagttttttttgttgttgttgtgtctctgccaggttttggtaacaggatgatgctggcttcatgaaatgagttagggaggagtccccccttttcatttgtttggaatagtttcagaaggaatggtaccagctcctctttgtacctctggtagaattcagctatgaatccatctcatgctgtgctttttttggttggtaggctattaattactgcctcaatttcagaacttgttattggtctattcatggatttgacttcttcctggtttagtcttgggaggttgtatgtgtccaggaatttattcatttcttctagattttctagtttattcgcatagaggtgtttatagtattctctgatggtagtttgtatttctatggggtcagtggtgatatcccctttatcattttttagtgtgtccatttgattcttctctcttttcttctttattagtctagccagcagtctatctattttgttaattttttcgggaaaaaaagaagaagctcctggattcattgattttttttggagggtttttcatgtctctatctccttcaggtctgccctgatcttagttatgtcttgtcttctgctagcttttggattagtttggccttgcttctataactcttttaattgtgatgttagggtatcagtttgagatctttctagctttctgatgtgggtacttagtgctataaagttccctcttaacactgctctagctgtgtcccagagattctgatacacgttgtctctttgttctcattggtttcaaagaacttcttgatttctgccttaatttcattatttacccaggagtcattcaggagcaggttgttcaatttccatgtaattgtgtggttttgagtgagtttctttttctttttttttttttttttgagatggagtcttgctctgtcgcccaggctgaagtgcagtggtgtgatctcggctctctgcaagctccgcctcccgggttcacgccattctcctccctcagcctcctgagtagctgggactacaggtgcccaccaccacacctggctaatttttttgtatttttagtagagacggggtttcaccatgttagccaggatggtctcgatctcctgacctcgtaatccacccatcttggcctctcaaagtgtctttttttttttttgagacacagtctcactctgccacccaggctggagtacagtggggcacaatctcagttcactcttgtgctccacctcccgggttcacaccattctcctgcctcagcctcctgagtagctgtgactacaggcacctgccaccatgcctggctaatttttgtatttttagtagagacggggtttcaccatgttagccaggatggtctcgatctcctgacctcatgaccagcccacctcggcctcccaaagtgctgggattacaggcatgagccaccacaccctggccttgagtgagtttcttaatcctgagttctaatttgattgcactgtggtctgacagactgttatgatttcagtacttttgcatttgctgaggagtgttttacttccaattatgtagttgattttagagtaaatgccatgtgatactgagaagaatgtatattctgttgatttgggttggagagttctgtagatatctgttaggtcccgttgatccagagctgagttcaagtcctgaatatacttgtaaattttctgtctcattgatctgtctaatattgacagtgggatgttaaagtctccaacaagtattgtatgggaatctctgcgtctctttgtaggtctctaagaacatgttttatgaacctggatgctcctgtattgggtgcatatatatttaggatatttagctcttcttgttgaattgatccctttaccattatgtaatgccctttttttgtctttgttggtttaaagtctgttttgtcagagactaggaatgcaacccctgcttttcttttttcttttggcttccatttgcttggtaaattttcctccatcactttattttgagcctatatgtgtctttgcatgtgagatgggtctcctgaatacggcataccgatgggtcttgactctatccaatttgccagtctgtgtcttttaattgtaacatttatcccatttatatttaaggttagtatggttacatgggaatttgatcctgtcatcattatgctatctggttattttgcacactagttgatgcagtttcttcatagtgtcattcgtctttatattttggtgtgtttttgcaatggctggttttcctttccatatttagtgcttccttcaggagctcttgcaagtcaggcctggactaaatccctcagcatttgcttgtctggaaaggcttttatttctccttcgcttatgaagcttagtttggctggatatgaaattctgggttgaaaagtgttttctttaagaatgttgaatattggcccccaatctcttctggcttatagggtttctactgagaggtctgctgttggtctgatgcgcttccctttgtaggtgacctggcctttctctctggctgctcttaacattttttcctacattttgaccttgaagaatctgaaaattatgtgtcttggggttgatcttcttgtggggtatcttagcggtgttctctgtatttcctgaatttgcatgttggcctatcttgctaggttggggaagttctcctggatgatatcctgaagtgtgttttccagcttcttttcattctccttgtccctgtcacgtactccattcaatcgtaggttcagtctttctacatagtcccatatctcttggaggctttgtttgttccttttcattattttttctctaatcttgtctgcatgccttatttcagcaaggtggtcttcaaactctgatatcctttcttctgcttgattgatttggctattgatacttgtgcatgcttcacaaagttcttgtgctgtatttttcagctccatcaggtcatttatgttcctctctaaactggttttctagttagcagctcctctaaccttttatcaaggttcttagcttctttgcattggattagaacatgctcctttagctcagtggagttttttattatccatcttctgaagcctacttctgtcagttcgtccatctcatcctctgtccagttctgcacccttgctggagaggcattgaggtcctttggaggagaagaggcactctgcattttgggttttcagtgtttttttgttgattctttctcgtctttatgagtttgtctagttttgatctttgaggctgctgacccttggatggagtatttgtggggattttttgttgttgatactgttgttgttgctttctgtttgtttgtttttctttcagtggtcaggtccctcttctatagggctgctgcagtttgctgggggttcacttcaggccctattcatctggtttgctctcgcaccaggagatgtcactcaaggaggctgtaggacagcaaagatgggtgcctgctccttcttctggcatctctgacctcaaggggcaccaacctgatgcgagtaggatcgctcctgtatagggtgtctgacaaccacgttggagggtcttacccagctgggtggcacagggaacaggacccatttaatgaagcactttgactgtcacttggtggaggggatgtgcttcgctggggagaaacccactcttctgggctgcctggattcctcagaactaccaggatgaaaggctaagtctactggtccacagaaactgcggccactcctctccctggggctcaggcccaggaagatcagggttctttccctgagcctctggctggagttggagttcctgcaaggagtccccaccaagtgagaaaggatgagtcagggtcaggcctgaagaggcactctggctgcagtctgccacagctggtgtgttgggctgtgggggaacctcttgggaccaagctgcccagccttcctggccccaggagaggaaaagcatggcctggagctgtagagatggatgctgtccttccccacccagggagcttagcgtgacaggcagttacaagtcccagtgctggctgctgcccctcctccaaggagttcaaatggcttagacagcaggcagccacagctgtggtgctggtggcccctccccctgggaacttggcaggcttaagcagattcgagctgagaggctgttgagaatctgcacagctctggggttgggaccctaggccccagtggcgtgggttcacgagtgggatcttccgatccatgggttgcacagttctgtggaaaaagcatggtttccccggctgggtagcacgctcactcgctgcctcccttggctggggggtgagggctcccctctcccatgtggctctcaggtggaccaccacaccacactgctcttccttcctctccatggatcatgccagctgcctcgtcagttccgatgagagaacctggatatcttgattgctggtggaggattcacacactattatgattctttttgatggagcctctctgatggctgctgctcctagttggccatcttggccctgcctccccgttcaagttttattataagattgcagcaaagcagtcacacctttaggttctaataataattattgtcctctagcaatttctaccacaactacagtgactttctccactgaagtcaaagtcgtccatgaggattggaatcagcttcttccaaactcctcttaatgttgatattttgaccttctcccatgaatcttgaatgttcttaatggcatctagaatggtgaattaaggttttaaatttacttagcccacatccatctgaaaaatccctatctatagcagtgtagccctacctaaagtatttcttgaataataagatttgaaagtcaaatttattgatccatgggctacagaatggatgcgttagctggtataaaacaacattaatctccttgtatatcaccatcagagctcttttgtggccaggtgcattgtcaatgagcattaatattttgaaaggaatcctttctcagcattaggtctcaacagtaagcttaaggtatttagtacaccatgctgtaaacagatatgctgttatcagattttgttgtgctgtttatagagctcacgtgaaataggtttagcataattcttcagggccctaggatttccagaacagtcaatgagcattggcttccacttaaagttaccaactgccttaatgcctaacaagagagtcagcctgtcctttgaagctttgaagtcaggcattgacttctctcaagatatgaaggtactagatggcatcatcttccaacagaaggctgttttgtctacatggaaaatctgttgtttggtgtagccaccttcatcaatgatctcagctagatcttctgggtaatttgctgtagcttctccatcagcacttcctgcttcaccttgcacttgtatgttatggagaaggcttctttctttaaacctcatgaaccaaccactgctagcttcatacttttcttttgcagctttctagcctctctcagttgtcacaggactgaagagagttagggccttgctgtgggttagattttggcttaagggaacattggggctggtttgatcttctatccagatggctcaaactttctccctatcagcaatacgtttgctttgctttcttatcatttgtgtgttcactggagtagcaattttaatttccttcaaggacttttcctttgcattcacaactgggcggctgactgcttggcacaagtggtctagcttttggcctatcttggcttttgacacgccttcctcactcagcttaatcttttctagcttttgacttaaagtgaaaggtgcatgattcttcctttcacttgtacacttagaggccattgtaaggttattaactggcctaatttcaatattgttgtgtctcagagaaaagggtggccccaggagagggagaaagataagggaacagctggccaatggagcagtcagtacccacacaacatttattcattaaattcaacatcttatataggtgcagttcctgatgctccaaaacaattacaatggtaatatcaaagatcactgatcacagatcaccataacagatatattaattattcaaatgttgtgaaaattaccaaaatgtgacacagatacatgaagcatacacatgctttgtaaaaatggcaccaacagacttgctggactcaggaatgccacaaaccttcaatttgtaaaaacaaacaacaaaaaacccccacaatatctgcaaagcacaatgaagcaaagtgcaataaaatgaggtgtgcttgtagctattgtagtcaaatccttagagatagaaagttgcgtggtggttgctgggcctgggggaggagaaaatggggagttattgtttagtgggtacagagttttagtttgagaagatgagaaagttctagagatggatggtggtgatggttgcacaacagtgtgaatctacttaatgccactgaactgtacacttaaaaatggtaaattatatattatgtatgttttaccactttttttaaaaaaaaaaaaaaaaaaaagaagaaactgagaaggagcaaccagtgaggagggagaagaaccagaacagtgtatttcctggatgcctaaaaaatatttcatggaggaaatcaaatggtgaattcaggtcaaatgatgaatttccttctagcttttctttttttatggagacttcactttggcacacttgtaactttactgacaatacccttttgtatatgcttttttttcccttatatcatgaccgtttcctgctaatattcaaattaggccgtttatttaagggttgtcaaatctcaaatagctcatcatagaatctggatgccaatatataaatctcataatgagctgttatttggatgttatacaacagtggtttcaatgaatcatccatgaggcctggagttgaaatgaatgctttatttattgtctcccattgctgattataagctgtttccctgactttgtacagatttcaccattatgtgaagccacagtcataaaatttggtatagatatttgaggtttaggaaagaagaagaaaactctttacacaacaaagtaaaggtttctccttttttctcctgattgctaaggagatcaacctttgacccttattcttggttccaactatttcttaatttacctaacatgcttcagtagtttttttggtttgttttttggtttgttttgtcattttgttactataaatgtgtttttatttacatctttactaaatggagcaaaatagggctaacaacttattgaatgatctgtgtgtgtgcgtgcatgtgtgtgtgtgatggttttgacagctattcacatttatctttagatgtaaattatatggcatagttccttttttatgttcattaaattccatagatgtcagtggtttccttggaaacaaaaacctttatataactagtcagagatttggtagcagaaatatcaggatgctggcaggggttcaggggtggttaaggaatggttcccttggcagatgtttgcatttaaaactcttctgacttttctccctgccccttaccatcatggccattcaatagtgcacaagataagatttttaaagctactattaaaatgtagaatattttctttaatggctaaaagctttttactttaaaaaaaaatcgcagatatgttaagtcttttctggggtggtataatttcccaaatttgagaagaggttggtgtatctcctatcaacagttaaatctgcatgtttaggcaatgcctacatttttcagtatatatggtgtccatttgtaaaatacagtgaactgcatatgtgtgtggttgaatcaagattctatgtcatttataatggccagcatctgtcctattaccttattgccaaagggttctaaaggacctggagaggttgtagagaaggtaagggaaaggtcacggttctgctcaagggtaatagtaggtgaaaggcctggcagccaagaacattctcacggaggcccagagtggacctgttgttgaagacagaattagtaccatgagttaatgaaacccaggtcttttcagaagattgtgactcatttttatcattgcccctgtctggtgtaatttcaacgtaaatccaatttgttctacatgcaatggtacatagttgcatttgggaaacatttctcaattttaattcttttaaacgcaataatgcgccatcttgtggacatatccgatattaaattcttaaattaattctacatagtgaactgctctctaagccagggttttcaatcatgggttctaatatagagatatgagaagcacttggggagcttttaaaatcctgatgtgcaggccacaccccaatcaattaaattgaaatgtctgctgtggggctccaacactgatattttctttaaagttcccaagagattccagtgttcaaccaagtttcaaaaccattcgtctaagtaaaaagagtaccagcttaaatggatgatttctcttttgaaaatagagattttacacagaaaagcattgagaattttcctacaaaatatgcttgtcaaaaggaccacttttcagtcaagttttccttaaacttgaccactatacttaatgtagagaagtacaccacggtacttgtatcagtcttctctggttaccacagcaaagtaccacaggctaagtggcttaaagcttaaacaacagaagtttattctctcacaattctgggagcgggaagtctgagacaaaagtgccagcagggttattttctttggaggcctttctcctcggcttacagatggctgccttccccgcatcttcacgtggtcctccctctgtttctattcctaatttcctcttctaataaggaacaagttgtattgcattagggcccaccctcatgaatgcatttaacttaattacctctttaaagcactattgctaaatactattaccttctaaattactgggggttaatacttcaacatataaatgttgaggggacacaagtcagcccttaacagtgttccctcattacattacaaagcctagcttaggatttgcttctttataaggagtagcagtgtatgattattttgctgttggtttaatatagaaaagtagatttttttctttataatcaatacaatggtcaatgtggataaaactgcatagtcagaatcatttcagaaatacacaattgcttttgcagagtggctttagtacagaatatgttgatttggcattatcagcactaatttctgcatgccccagggcacccagtatgtgtctttgtgtattgcaagtgcctataagagtatagttattaaggtcacaagctcttgggtcagaaagccaagccacaacaccaataacaagctgtataatcctgcaagttatatcatgtctctgagacttagtttcttcatctgaattacaggaataatcgccatgtttatatcatctagttgcggtaaggactaaatgacaaaatgcacgtaaggcacctaacacaattgtcacatccattgtttgtctaaatgcattttgccatcattattaagtaaataaaatatataacttacatgtatgtgatgtagtgggaaaaagcaagttaaataggcataatttacctatttaccatagaattccatgcactaatatagattgtcactataatctatatttatatatatagattgtcactataatctatgtataagagatttatacttttgtagctgtggcatttaaacctactgattaaaatctaacttctatgtattagctatagaaaaatgaacttgaggcatatttatctttgcagccaaacacctacccccagagaactatcacagcaatattgttgtactaagacttacagttcttatttagaaaactgtctagatttgccaacagttaaatagattttccaaccatcaaaataattttagagcaatttactttcagttaagaacatgcgggtatctttttctgcactatgaagtcattgaagcaaaatccaaagcactgttttgaaatggaataacaaggttaggggtcagagagacccagattcaaactccagtgcacttattagctgagagaacccaggaaggtttattggtttccctgtgaatgataatacttgctgtattgatttgtcttgctagttggattttaactggtaacaagacataaatcataatgtttgatactacttacttccctatgggccttaagttcacttttcagtgtattcttcttaatgttctgtgagactggtaaataatgaagtatatatatatatatgtgtgtgtatatatatatatatatatatatatatatatatatatatacacacacatatatatatattacttgaacttcctcaattttggagattaggtcataaactaatgtggcatgtaatttgatacatgttccagcaggggaaaatactgggatgtaatttaacgaaagaaacattttgaaatgggaatattctctgaaaatatggagtatatcattacaattccttttcagctttaggactcataataaactgggcactgtccagtttatgagcagcgagttcctatagtttgaaagtttgcgtcccctccaatattcatgttgaaacttaatcgccgatgcaatagtatttaaagttgtggccttttgaaggtgattaggcaatgagaactcctccctcatgaatgtgattaaggtccttataaaagagatttcactcaaggttcagtcttttttgcccttcctccttggcccatctgaggacacagcattcgaaatgccaccttgaaacagagagcatccctcaccagacacggaacctgtctacgccttgattttgagcctcccagccttcacatctgtggaaaataaatttctgtaaatatttcccacctgacagatctttgcttataaattggccggtctgtttgttatagtagcacacatagactaagatactagtttttaatttgggtactgcagctgatggaataacctgggtagagtcataccatcttttaggaatctcaccttcctcataaaaaatgaaagagacaagcaggatgatccctggggactaaaggtaatatttgtatccatcatggagctattgggagaactaaatgatatacatctctcaaatggatttgccagccataatgtgtgatatagtaatatcaatttgtgagtaagttgggtagagtggaaggaacttaggaatgtataccagtttattctgagaaatttgtgttttgtcttctttgaatgggaaatggctgaaaattcttaaattccttcaatgtaccataaaaaagtgaaatcctatatcactgcctttggatgtgatacatgacccatagtaggtattttcgtagatgaaagaattcctatctatggcatttatcttatgtgaaaagtggcaattaagatagtaacatatttgccacttaacagatatttgttaatgatgaaataaagttttccggaactcctgaaattaatgtccatagagatttcaagaagatggaataacctaactaattagacagtatgtttgttggtgtttaaaggtgagacaagaccactgagattaaaagatcagaaaattctcctcacacacctaatacattttctctatgccacctggtacttctgtactcaaatgctgcttgatttttatatttatacccaagaattactgatttcaggtaagaacagagggcttgagagaagaatttgctcatcactgcctgccatgaatgggcatagctctgtgaacagttattgtatttttttttcctcaggtatatagaatactttatcaaaaccaaaactcactgtttctccaagtgagttccttggaatactaatagatgctataaaaatgtcatctaggtgtggtggctcacatctgtaataccagcactttggaaggccgaagcaggaggattgcttgaggccaggagtttgagacccaaagccctatctcttaaaaaaaatataggtggatgcagtggtgcatgcctgcctatactcccagctactcagtataggctgaggcgggaggatttcttgagtccagagttcaaggctgcagtgaactgtgattgcaccactgcactccggcctgggtgactggtcaaataagtttgggaaatgctaagggttcctttattgcaggatttctcacagcttttgatgtgttggacatgggttagtgtcacttctttcttttttctttaactatgggtctcttggtcacaagcatctcataggattaatataaatgttctaaaagccatttattatgaagttaaccacacttaataaactagaacaccagtttatgagtgatgcttgtcttcacagtagtgcagatcctattaaagatgtttagagaacaggttcttaggtgatctaaaccagaaaggcctttttcatatatcttgataatattaatataatgttgaattttgtcttgtattatattatgatgttttgaattttaaagtttactatttgcattcttcccacctaattaatttttttaatttgagaccttatgacagaaaaccatcagcattgcccacatattactcaaaacacaagaatttcatttattcccatagcacctggaatctatgctggcatttagacaagcctaatgcctagtgtaccactagagtgagattctctgtccactcttaactatttctagagcctatttttctatggtttcacatcttatgacttatataaaattggtactacttggcctttgtggaaggattttaagtcaaggtaaaccttgaattgaggttagattaaaagtggtagaacttacttagggagcaataacttttaatagtcatagtttcttttcggttcctggtgtgtgtgtgcagaaagaaagaagtctgatgattctctggttcatgggagttgacttttatgccctgaaagtgaggctttgcttctgtatcctcacactggggaacagcagtggttaagaggctccaccagtattactcatgtggtcacaatcaagttgcttaacttcatgtcttgctttcttcatccataaaatgaagttaatagtactatttctcagggttattgtgaggactaaaggccataacatatatttcataataggggatctgtaagttgtagttactgttatccttaaaactataggccattagtgcatatgtttaataggcttgaagctgtgccattatttgacaagttaaactcttggttgcatcatccatattctcaatgtttttctttaggtatttgcatttgccatctatagtatataggcttctatctggcaaagttttcacttttaatggtatctttaacaatatttttcaaaagctttgagcatcactcatatttcaaaaatagtaaggtcatgttaaacttttaaattaaatcgtttcttcctagactatttcaagatttgtaatacctggttaaaattgtttagcaaacacaatttttctttctatgaatgttaattaaaaattaaatttgactctctttagttgaaattagtcattttgtatctgtgcatgaattacattttccttgattcttatagtaccttagtataaataaatttagtaagagtttaaaaagaagtttccttggttgaggtacatacaaacaatatgggaaattgaacacctattgactttattatttttgccatagataaatctctactgtcgaaagcagtagttaatgagacatttattttattttatgggtctctgaaacatgcttctctattaatcaatttgcttgcaattttgtttgaagattaaagattctttagaaggcattgtctacatattattacttatggataccagatgaaaatctaaataaaattaatttaagatctcttatattagttctgtcctacacatataccaaagaatgtggaatggctgaataaggaaaattaaattttaagtttacacaattttaaagtcaataatgctttcaaataaattatctatacataatattgaaaaggaatagctcttagaatatctaaaataaaaatagatgattgagtgggatatttcacatgagttggtggtttataaaactttgagaaagtatgttaaagaataaattgtgtaagtaatagcgaactagactcagtatttaattttatgcttagctgctcaaaatttcatggtttgagttgagaattcttaagtcaaataatttatttgaaggatactgtagagcatttgaaatactgtgaaggtgtgactagaaatctgtttttcccattttaaaaaaaaaacaaattgttattctagactataaaatatagaaagtcataatagatggatactcttctctgtaaatatattttcccctgatacttaactgtaccatgttattctaaattattcctggtaaatgcttacaactcttccaagtgtctggaaactcatcaagcttcttttaatcatgtccctcaaatattcggcttgtaatttactaatattcatgccctgtttagattgtaaacagagaaactacaaagttgtaacagaaaagtaatatattgagctgaatcatgccttacttttgtaagttgagcttgtttctctggcaacaagatgttagataataaatcatatatctaaaaccatataactacagaagtggggagctgaaagttcagaagtatcatctgactgtgttgatggcatctttacctcaattaataaggtgtggcaacgttcactcaaggacagaaattcaatctgtggtggatccaaggggattcaaaatatttcttttaatccaaccaaaacatattgctttaatggcattagttggtattagttgcatgtggcaaaaatttcatgcactattaatcctagcactacactgcaacactagaattatgtgtccttggccttaaataaattattcggttgtatgattgagaagagaaaaaccaattattttagaggccagtcctgaattattgccttaataaaggttcaatttcaaaaaaatgggaagttgctcagtccagttgaaaaacaaggtgggaagagtaacagcaagtgagtctttaattttgtcaacatctgatgctactgttaacacaaaaagttgctttgaaaaaaattcaactaaataagttgccttcgtggtttagtaattccagatatacacaatcgtctgtttattttcccaaagatcaaactgtgttcatctatatatttgcatacgtaacatattaaagttttctcatctaacatgacactgtaagcatggccatgattctaaatatttttaatatttatcagttgtatagctgaataataatgcattgattggaaatcatattaactacttactatttacttttgagtagacaatttctgttttatttttgctattataggtaaatctgaagcagatatctcttcttcatttggcgtttttattctttggtaatgcctcaaattgtaatcctagcagtgagattacagatccaaatagatctaattcaatccattatcacaggtttcttcctcatttcctcttctttcatgtatatctgtttttgtatagtggcaattttgattccttactgcattaatgtattcacttctttgtcatagtctacacaaaataattctagaataaaaatactgttgctactaatacaagtccactagagaaaatccaacgtttctttgcaattatctttattccttattgtatgcttcactaagaatatatactccaagattattaaaattattttctatagagttatattattaatttgctatacacttagatttatatatttatagttacgttcagttttagagattaaaatgctctattgcttttatcaattttacatttggaaagtataaaatattcctttgcctcagcattcaaaattatataaagaagaatgctcagggaagtcactctcatccatatccttccaccctattcctacccaccttctggttttccttaccatgtttctgtttacaaaaataaggaaacacacacacaaacccatacctagctacccagtcctctcatctcatttaataaaaagtccatctttccccagtgaattgagacaccagttttttcaaaatatatgtaaattgcctcagtctttcttacacaaaatgtaacattctatctatgtgcttttataggttgcctgttttacttaatataacgtcaatacctcttcatatgggtcatgggaatctttttcattcttttgtacagctgcatattgctccactatatggaggttctgtagttttttcagtcttctgtgaatgagcatttaggttgtttccattattttttattatgcataaggctacaattttttttttaaatgccttcctttacatatgcaaaagttcagtttcaggataaattcctagatttgtttgttttgctaacatcttcatagactttttctttgtttagattttaccattttctaccccccttgcagtgtattacagaatctttattcacacagtctcaccacaaagtgtattgttaagcttgttatttttgccactttgacaggaaatgtgattaatacattttaacttacctttttcttacctatgcatgaaactaagcctcctttcacatgtttaaggaccatgcatgtatatacatacatatatttctaaaacatatataaatatgtatttatacacacatatatgtcttaataaatatatgtcatatgttttaatatgtcataatatatgtcttaatatacataaatatgtcttagtcactttggacttctataacaaattataaatatgtcttagtcactttgggcttctgtaacaaattaccatagactggtggctgaaataaaaacattacccacagttctggaggctgggtagtccaagggcaaggtgccagcaaatctcatgtctgctgagggcccacttcttggtttgcagttggctgcattctcattgagtcctcacataggggaaagcagagagagggagagttgactctctagtctctttttccaaagacactaatcccattttgagggctccaccctcatggcctaatcacttcccaaagtccctacctccaacgccctatcacgttggggtttaagcgtccatatatgaattttgaagggagacaaacattcacttaatagcacaatgctcatttgcataatttgcactttttttttttcatctggtatttcgtcctttttttctccccttggtttttttgagctctttatatatcaggagaattagctctctatcgtaccctagaggtgcaaaaatgttctcccggtttattttttcccttttgattttgcttttggtgtttttttgttgctgttgttgatgttgtttctgccttgtaagtttttgtttttatttttatctagtcaatttatcaatattttatcttattgcttttggcatttgagtcacagttagtaagtctttattcatgcctagtttataaagaaaattcacctatagcttctttttttttttctagtatgacttcgtgattttccatttagatcttggagcatcttggaggttttttttgtttgtttgtcatgaggtatgaacccaattttatttttctaacttaccgttcttttgtcccaacactatttttttcagaccatcttttgccctatcctggtatctaggtgttccaataacatttatttaaaagtccaattgtatatctctttttatttgcaatccagttgtgccaacaccacttatttaaaagtctatcttttgtactacttatcaaaaagtccaacttttgtctaggtgagttaaaatacttacctttttcatatataatgtttccttccatgtgtacctggatctatttctggaatattttttactatttcattgttcagtgtgtctattaatgcttactgaaatactttaaattcaagttctataagggaaaagtggattcttattctagaataacaaaacaattagaaattggcattttttaccaacccattatatcaaatattactctcaatactattctctgctttccaacaaccacctcccaagaaaaaactatttttccctaagacaatttttgtttgtttcatatattttatgtaggtagagaatgccattttctagttttcaaaactttattttttttactttattttttcaaattcctagaaaatgacaaaatcattactagttaaacaattagcaatatcttgtagatttacccacaaagtcccgaaaataaaaataagaaaaaaaaccttttggttattctgccttataaactttcatttttagaaatccatgccatcatataagttgtttgttctataatttctgagctcattttatgtaaaaataactcctgtgcattattcatgttgacaggccctttaaatagccataaagcctgtgggaacagattaatgctgcatctgccctgtgctttttaagtctatcatttttatggaatggaaatcttgcataatgtcagaagttttctgacattgtcaactgcttgtggtggcatagggaagtaccttagctgcactatgtgggtgacaatgtcatatttcctgattggatttttatctgaggagggtgagaactgtcagtttcacttcctcttagaaagatattttaagttgaataagttttcctttaagtgacttgtcacaggtggcaactgtctgagcctgtgtattctattctttgtgccagaattttcttaccactgattaccaggcacataatcactcttgccatttatgacctttgggaaatgaaaattaaaatgttattagtccatgtgggtagcagtggaattggtctgatgtaatgtttttaaattgtttttattttttgaaataaatgatttttacatctactaaaaagtaaattacaactattaaaggttatcttattaaaaagtatttccccttctccatttcttctgttcccttcccctgaggcaaggattcatagtactgcagtttcttgttttcgtttcccagaaaacctgtaaatgatgacatgctatcaaatgctatttaaacttagcaatttgttgcagaaattatgccgtgtcagcacaaatacaagtcctcattctttttctagaggttgtagagtattatttcattttatagatgtgccataatttatgtacttagtcatttgttaataggcattttattgtttccggttttttgctgcctcaaacaatgctttgatgtgtatatatatgtatatataaaatatcatctttgggcacaatacaggtatattcgaatttcctattggtgaaattgctaagtccaaatatatgtgcatttttaattatgaaatgcattgccaaatggctcagcgaagagattatataaattaatcaattacacttccaccaacaacaatcaagattacctgtttcttcatactcttgccaacaccatgtttgattgaatttttttgatctttgaaatgttatagatgaaaaattgggagctctttattacttaaatttgaatttcttctactgtgagtggagaggaaacttttcatattgtgttgtttgtatttctaaccatatcctttgcccattttccaatatatagttcttctcactgtttcgtaagatattttgatatattaagagctatcatatactggaaatatgatctccagcttttaattttaatttgaccttgtagaattattgccttccagaattatgttttgtagtcaaatttattagtccctttttaaaaactgtacttccaaacagagcaccgcttggaataactattctaaaataataaagattattttgtgatttcttccagtgtttttatgattttaatttttatggttgtatctttgagctatctggaccttattttatgacagtgacaaaggaatctttattagtcaggattaaagtagtccatgataacaaacaactcccaaatgtcagtggaataacacatcaaaaatacatctcttgctcaaaccatctgctgaaggtctgcaaaaacattccaagatagctatcctcagtgatctagggatgtttctgtcttgagctcaaccatctcagcaagaggccttgcatttgctgtggcaggagaaaacagctagagaatcaaagaggattcctcaatgcctcagcctagaagtgacatgcatcccttctgcttattgaccatgtccaagtcacatggcccagcccaattcaaggaggctgggacatacagattccagtatgcccaggggtgaaaggagaaccagtgattagtgagctcataatgtttaccataatatctattttatgttactctagatggctgccaggtcatctaacattacttattgcataacctatttttttctcattgatttggaatgctatcttggttatacactgaaagcttctgtatctttccattttcccctgagatcattgacttttctatatatttttagactagtaataaaatgttttaattattgtggctttacaatatatattacttggtatagtcctgctttatcaagttttatttacatttatattaattttcatttgaatttcagaatcaatttatattgttctcctaaaaaccatgtgtattttttattggtatttctttaagtgatgagattaatgttataacactttatgtctttagcatactacttttatgcaagcagaaaatatgtcttcatttatattcaggttgtcttttgtattccttagtaatgttttaaggtctttatcatatagatcttacagttaaagttaagcttccgctgagtgttacatcactttgatgttttaagtggagcttttatttacatttctaaccaccttttattaaataaaaggaaactaatttttgacataatattatgtatccatgtacttcaccgaatcttttaaaaaatagtttccaggccgggcgtggtggctcatgtctgtaatcccagcactttgggaggccgaggcaggcggatcacaaggtcgggagatggagaccagcctggctaacatggtgaaatcccgtccctactaaaaatacaaaaaaaaaaaaaaaaattagccaggcgtggtggtgggcgcctgtagtcctagctactcgggaggctgaggcaggagaatggagtgaacctgggaggcggagcttgcagtcagccgagatcgtgccactgcactccagcctgggcaacagagcaagactccatctcaaaaaaataaaaaaaaaatttaaaaaaagttttcatttgatttttttcattttaactcatactctctgtaacaattacagtgtcacctccttatttctaaattttatatctatttttgtctttgaatttaagtttatgtattttgatgacttggtaaaattctcatccctttgcagttgggcaaaaattaatcagtgttgtatatgatatcattttattagattctaaactctttgtgagttagaactatttaattaaataaaaatagttgacatctcttataggaaaatcactgtgtgaagtcccaaatgatataaaaaaagaaataaaacatagttcttatgctcatgattcttacctttgaaaccctccctcctcagccccacaaagccaggcacagtggctcatgactgtaatcctaaggctttgaggggctgaggatgggaggattacttgagcccaggagttcaaggcttccatgagctatgatcgcaccacagcactcctgtctgggtcaatgaagcaagactgtgtctcaaaaaccaaccaaacaaaaaacaacagggagtgtccaaaggctgtaatacaaggtcaaatgtagtaaatgatgtaattgggaatcgtaagaagtgtttggaaatattagattttaatttgcccagtggtgccgtaggttggaatggagggaatgcaggaagatgggcaaggcttcacagagaaggaagcatttaagtgatatgttgatgttcagaaacaagatagcatgtgagcagggtgtagtgacacgtacctgtagtcccagctacttggaagcctgaagcaggaggatcacttgagcccaggaagttgaggcttcagtgagctctgatagtgccactgcaagacagattgtggattgcagaaatggccattgcattcctcaggggaaaatctatactcatttttaaagcttaatttttttcagcatctagaataggtgcacccatgaacattcagtatcttcaggagactaaccatatgggaatggtttactagtaactcatttgtacttgagtatccattatattggaaactaggaccatttctttctcattaattgagagtcatgatttgtctataatgtcctttatgatgcagaatttatctgatactttgagttaaatcaggcttgctttttggctcataagtatttatgtatagacagaaattgtggcttttatctatttttattaagtaaaattgtgactgattttatagcaattaagatgaatttttctttgcagacaaattttattgaaggaatattgacaatcaactttcattgaaagcaatgggttttgtgatttcatggaataaatgctctgttctaagagttaactgacctatgtttttgtttcagggttttggctaaatagctgcacatctgtagcacaaagccatttttcctcagtttcctattgtgtagaaaaaacatttgggatcacaaaattcctaggttccttccattctgaaaatttttacactaattccaactttgccttgaatgtctaatgatttgcatttctctatgtaaagcacatctcctggcaccgaactgaaaatgagattagaaaacacctagtagagaggataaaaggtacaagtcctaagcttattttgcattccccttcttccttttttctcccctgagaagcaggatgtcaagctccttggaaaactaatatttcaaaggaaatatcaatttgcaactgaagtatgggattgaatgatttcattgtctcaaaatgatatggtggtgagggtaacattctataatttaaatattcaaagttttgaaaatgtacagattcttttagtaattcttccccagaaatactagtatttactagtagtattttttaaaagcaagtcttctttgcaagatataatcagtattgaatccataaaacagaatattttggaagtatggctttaacaccatggcataattatagctgattatgaccagagttttgaattcaagtaacattaacacaccacaattattgaagttgtatgtatccagattagcaaaatgagcaatatttttctctcaacccttaattcctacatgttagtcctatttcctctgatattttcaggagtcctctttgctttcagtaggtattcaaatgatgactctttcagttctccatatagaagacagaaattagtcttattctcaagctctaacaaaccttcccaaaacccagtgacataaaacaataaacatttgttattgctaatgagtttgcaggtcagctgagtggttctgggttcatgtatgtgtctgtggtcagctgtgggttgatgaagtggctctgctgatttgggctggggtctctcacatgtttcgaggtcatctggctctagactagtctagagttgtccctactcatctccgcgtgttttgttcagctctcccttaaaatcagcactcttctggtttctccaccctggggatatcctcacagtgaaagcagaacagtaagagacagagtggaaacacacaaggcctcttgaggcctagacttggaacaggcactccatcaattatgccacatgctttcgcccaaagcaagtctcaaggtcaagccagttttcccccgatttagcagtagggaaatagaaggagctacagtcatgttgcaaaaggatgtggatacagggaaggtgaagaattgtggccacttttgcaatcaatctaccccactttccttctgagaagctggttgtttccagtgaaatcaaagccagctgaaacctggacaatcaagtagccaaaaaccttccctgttagacttcagcatattgaatttggcttgtaccaatttacagagccagttgttaaacacagctattaaactacataaacttcaatctaaatacattatattgaaaaaagatgatcatgttaatactgtcacttcctactttttattattatccatgttctcaaagttatttataatcattatatccaaatggtaggaatgctatataatgatgctactgacatctctgcccaaatctgtgctcagtgacaccatgttgatagattgaaattggccatgagagtatttacacaagataaattgacaaacactactaattagggctttttttcttcctttttttttttgatagctgcttgttaacatttaccagcccatcattgcctgtatgtgtgatggaggatttgaaggcccaagtcaagtcattcctgcattttatagcatgagttacagatttactttattgacttttatgtgttctatggctttgatggaagaaggaaaatatgtggatagagtaattgaagaaacgaaattgcttaaagctacattttaaaatcagtaatgaccatagtgataaaagctgtttctctctttctttagtaaactttactggatgtaatgaaaacaaatttattcaacttactagtgtcagtgtacaagaataaccttaaggaaaaatggaagaacatgcaggtaatgttttaaattacagcttcagtcattaaaatatggcatatgcattcaggcaaaaattgtcttgtgttaagtgttttcaacacataataatttcaagatgaaattattgtgaattgaaaagcaacaaaaggaaagtgaggttcactatcttctatctccttgctaatggaggccagaacttatttagttttgtgagtcagatgagttgaaatttgccttccagtattccaaggcagcaaaaggtcattccatctacataagagcctgtcgagcagagagcccttttcataaagaaaattcattgaagaagcactagaaaatgaatataatgcaaagagtaaggctgttcaaattctattattcagttttaccagtattacagtaaattcccagaaaaaacaagaattatagtgattttatgtgagggatcaacttacctgggctctttctggctttttaaaatccgtttattgggggtattttaatgaattgttagaatgtggtattggacagtgggaacttataatgaatatttgagatgtggtgtttcagagtaggaaaaatgagactgctaagtaagtaaagaatcaggattctatttataagcccctgacaatccaaagaagattgttttaactttcagtgtaacttctgaggctacacagcccattgcctcctgatattttaactgttacacataaccaagggaggaaagctagaatgaatcatgtgatactaaaatgagacatgcatagcttaatttaacaaatggataaatttgaaaataaaattttttttaatgtgagcaaataagaaatctttcatacagaatagtcccaagtaacttatgtggttaatgcacccttgataggctggaaaaaaactccccagcctttaaatcacagataacgagtatcttccaaagagtacaatatggaaaaagggaaaaagagtaactttctcagtggagaaacctgacaaacactctgtattagtccattttcacattgctgataaagacacacccaaaacttggaacaaaaagaggtttaattggacttacagttctacatggctggggaggcctcagaattatgcaggaggcaaaaggaacttcttacatggtggcggcaagagaaaaatgaggaagaagcaaaagcggaaacccctgataaactcgtcagatctcttaagacttattcgctatcacgagaatagcatgggaaagacaggcccccatgattcagtgatcttcccttgggtcccttccacaatatgtgggaattctgagagatacaaatcaggttgagatttgggtggggacacagccaaaccaaatcacactccctcagccggtgatcaggtcaacattttcagtattaagtcatgttgctggtttgtaaccttggtgtgatgtaataatgacattatctgctggtcttcttccccagaaccgaaaattccagtctaatcatgagaaaatcatcagacaaatccagattaagggatattttgcaaaatacctgagcaggattccttaaaacagtcaaggttttcaaaaacaaggaaagtctgagaaaactcgtggtataggggaacgtaagaaggcatgatgagtaaatgcaatgtggtatcctaaatgggatcctggaacaaggaaaggacactaggtcaaaactaaggaaatatgaatagaatatggacattagttttttaaaaatatcaatattggttgattgactgtgacaaatatatcatactaatgtaagatattaacaacagcagaaacagtttcccctgttgtagaaggtatagataggagtattctgtctattctctttgcaacttttctgtaaatctatttatagacatctaaaatagttgctgtagtagggcatggtggtgtgaacctatagtcccagctaatcatgaagctgaggtgggaagattaccgggggccaggagttcaaggctgcagtacatgaggatcacacctgtgaatagccactgcaccactccagcagcctgggcaagaccccttcttaaaaaaaggaaaaaagaaagaaaaggaaagaaagaaagaaaaaggaaaaatgaaataggtactgtaaaactgttctgaattggaagttttttttaaaaaaaaaaatcagattatggcgacataaatattagacatcccttagcaaattctctgatattttaaatcagatgcatgggacatactgtaaatttgtagatagctgaatgcaacacatatttaatacaatgattcttaactctggatagctttacacctttaagcatattagcatttttgtctgagtagctgaaatcacactgtaaaaaaagtcaactgtgttagggtctatttctagctgtgccactgcccagctgtggcatctgaaacaaattacttcatctcacattcggcagcctttctgcccacgccacaaatatagtgctgtgtgttcaggacacttaagaagtcatgtaacagtaataatttttttttattgctaatagctatgtaatcttatcaaggtctatttgaataaagggctctacaatccaaaatatagttgatttactatcaaataaatttaattttcagtattttacatggtattcaacattgtaatttaaacatttcgtttagaaacaagtagcatttctgtgggttagagactgatttggagagaccacatccacattcacttaccatgtgttcccaactaaattagctgaagatgcaaaaacccagtggacataaagtcagggctaagggagagaaagtgtgtattatctaggctttacctgggtaaggaaagggcttttctgtgatggcatgcaactgcctatgacattctttctacaagtagggtcttgatggaattaaagaccataactcgaacttgctatgctacaagccttttctatgggggactatattcccattccacataaacaacattagcaatcaggggtctgcagatattttcttgaatgaaatttgacatctctgaggaccgacaaggatactgctcatatggaatgtatattatttttattattattattattattgttattattaattttgagatggagtttcgctcttgtggctcaggctgaagtgcaatggcatggtcttggctcactgcaacctctgcctcccaggttcaagtaattctccttcctcagcctcccaactaactgggattacaggcgcccaccaccacgcctggctaatttttgtatttttagtagagatcgggtttcaccatgttggccaggctggtcccaaactcctgacctcaggtgatccacccacctcagcctcccaaagtgctgagattacaggcatgagccactgcacccagctggattgtatattctgttaagagtggggatcaataataggagacaataaacaagcaaataaataatattatttaagaaattgatatgaactatgaagaaaactaaagcagagtcacaggaaagaagatgctgggggatgaggtccccccattgaatctgatttaatacacttttatttgggtggtgcagataatgagttgagtctgaggaaaatgatcataaatccattttcctgatagctaaaaaaaaattagaactaataaaaactgtaattttttataaataaattcacactgtgtatgctttttttctctctgggttggttcactcaacattatatgcatatattgttgggtgttactgtagattgtccattttctttgctgtgtagagttttattgtatgaatataccaaatgtatttatccattatacaattgacagtcttttgtatagttctcggtttggtgctatgacaaagagtgttgctttcaacatcctaacacatgagtctgacacaaacacctatgggtggaattgctgagtcctagagtgtgcttatattcaatagagcaaagtattttctcaaagtagttgccctaatctacattcctattaagagtacaagagagatcttgttctccacatcctcaccaaaagttgattagtgatccttttattcatttatgtctttctagtgagtgttccatggtaacacctaataaacgatccttttattattaaattaaatttatataatttatttttattgaatttgatgtgcgtattatgcccagttataagtcctgatgcatgaaccacacttgacacgtgagcctctactcataggcccatgcaacctgcttttttttatttttaagttaatttgtaatttttaattgtaatgggttgaatagcagtccccaaaaagatatgtccatgtcctaattctcagaacctatgaatgacaccttatttggaaaaaggctccttgcagatataattaagtatcttgagaggaaaagatcatcctgaattacccaggtgtgtcctaaatccagtgacaagtgtccttgtaagagacatactaggaagatttgacacagacagaggaggaggaggcaatgtgaagatggaggcagaggttagagcaatgccaaggaatgcctggaaccaccagaggctgaaagaggcagggacctgaatctcccgtagcagcgtgacactgatgacactttaattgtggacttttgatctccaaaactttgagagtcaatgtctgttcttttaaaccaccaagtatgtggcaatttgttatggcagcctcaggaatctaatacattgaaagagacaatttatcacatcatctaaaactgcaccagtgtgctaaccagcagccaaatttaaaatgtagctggtccacactggatgtactgtaagtgcaaaatacacagtgaattttgaagtcttagtatgaaaaaagggatgcaaaatatatcatgaatacctttgcatgttattaataggttgaaatgataatatattggaaatattgagttaaatacatcttagtgttaaaattaatttcacccatgcctctttacctttttaaaaaatgtgactactggaacattttaaaatatatgtataactcacatattctattagatagtgctacctaaacaagagtgggaacatttagaggtctgtctataagaattacagcctaactgttgtcagtacatcataaattcattcttttagtctttgttcacccaatgaaagagtagacttttattgggcttctgttttcaagttctgttgcacagattggggtataaatatagagatcctgcattccatttgtgtaaactattggggtctatacagagaccccaatagcagaagagcatgtggatctgctacctgacaaacagaggcattttcctgcataaccctttcaaataggagacaatttcctggccgggcacggtggctcactcctgaagtcccagcgctttgggaggccaaggccagtggatcacctgtggtcaggagtttgagaccagcctgaccaacatgatgaaaccccatctctactaaatacaaaaaattagccaggtgtggtggcgcatgcctgtaattccagcttcttgagagactgaggcaggagaatcgcttgagcccaggaggcagaggttgcagtgagctgagattgcaccattgcactccaacctgggcaacaacagcaaagactccgtctcaaaaaaaagaaaaaaaaagaagacaatttcctcagtaaagaaattgacgcttataaataataaaattatggatcagcttaccctagttattgcatgtggaggaatacattgtaaggtattattagttattgctacagtaaagctgcataacaaaacccatcaagcacaatagtttacaacaacatgcatttattttattgttcaggtacatatatgctggtgagttatgctgtgtgctggctgagtttggatccagatagccaggatccagttagccaaaaccagtcacatggtctaaccccaaatcagtgggcagagatgtacacaaccccctacttgaccccactgtggggttccagagggtgggactgaggatttgagaacaattatcacatccactacacaagaaaacatcattttcctcttctatctgactgtcatttcaatagcaggttcacattcattgattatctaagatgtgatcaaattatgcagtaagagaagcaggaagtcagagatgagtaactagctaggccctgtcttagaggattttatggtctaatagaggacacaggtccattatttgacctccttgtgcttcctcatccataaagcagatagcactactgcttgctttacatggttatcctgaagattcatatgaagggcaactcatcaagattataagattataaagatatagctgttgtctgtatctgtctatctagttgtccatctagttatttggtttggccttgatttttaaaaactagctgcagctatattgatatgtgctttggaaataaaacaacatggaggaaacacagcatgttaacgatgcctatatttgggttttggcataatgaagaatttgtttttctttttatatgtttcagtatttcctaaaatttctttcatgatcatctgtgaccaaaaaaaaaaaaaaaccaatatacattttaaaagataatttacccagcgaattggtttaactggggaattctagctccaaaatttgttttatttgctaaagactttgaccaaattgtgtagataattatgcaaacattaatgtttactttgttttcatagctaccaccttggaattttctagaaaatgttttatttttaatatacatttatggatttgatttctaataatttgcattatttttattttaatattacatatgtttaaactataaacaaggaagtcagacatgtttttcttgcctcagccttactgttatttagaattgtcaagtattaatgtttccctttcgttgacaaagatggggtgtgctgccacaggaaacccttgttatatggaggctcttccagctttatttaaattgtgaacatttgtacttaataacacgaacaatgagcagtctggatttttctttttcaagttgtcagtgcaagtaaaggcattttaaaatccgaatctgcttccaccagcagttttgataattaaagtacacaaaatgtatcaaacatttgagataggccaagtattccgttgaatttgttacagatcttgaagtggactcaatcactacttgctacttttcagagaacctttccaggtatactagctaggtatgaatatcagaaggctattaccactgtttgaccacaaaggtaaagaacatccaatagacaactaaattctagatctttctttatttgcggtatgggaaattttttaacatattctgaatcttttattttttgcaactttcactgtctcagattagactttaaaactcaagagctagaataattggtctagcaccatctctggtgtcttctatggatgcgttgcctacagtatattctgtcatcatctgtggttttctaaactgaattgcatttaatttcaatcaagcaattcatgctgtatttgaacttcaggcatatctttattttccagaaagcctgtttatcatatggccactcctgacttcctgaaactctaacagattaactgagaagaaaacaagtattatatttctaaggcattttcagctagtggaaaagataaatgactatatgagtcaataaaaaagtataattttcattgaaaggtagattggaagagcactatcaagacaaaaaaaaaagaatctgtttttaatgaaaatgaagagatctgttttctcaatcgtcatactaaaaaatgagtggtgtctgcacatatttttatttgggataataaaattgaacaagattattgctaagccagcatactaaggaaagaggacatataagccatatcaaatttaatgtaattgccccacactatcttctacaagaaacaaaaacaaaaaacaaacaaacaaaaacttggaaataagatttgtgaagtgcacattgtcttgatgacccatggaatttcaaccagctcttttaaaagaagtttacctataagatgccttagacacaccctccctttctgaatcctgtatgaatgcgtaagagaagaaaaaatgccacaaacagcatgggatgttggaaagaattggggaatgtgagaaatagaaaggaaagattaaaacaatcaaaaatcaaagaaatgtaaagtattacttgagaacatttctctgatgtttaatctaatattctatccaaagctttctgcactgctagaaatgttctgtatctgtgttgtctgtatagtagccattagccacatgtagctgtggagcattggaaatgtgacttttgtaactgaggaaatgaatttctagttttatttcattttaagtgtaaatagccacatgtggctagtggctgccttatgggaaagcacatgttcacagctctacctctcaaagtatgtttgggagtttattagaaatatagcatcttggctcccacccagacctactgactcagaatatgcattttaacaagatctccaggcaagtggtttgctcctgaaagttccagaggccctgccctagagcaatgttcacttgctaattaaccacccattcagaaacactgagaattctttattgttatcatgggtgagtgaatattagcagtgtgttcattttatccacagaggagtccttgatgcaatagggtgagtcataatagtgcttgaactgcttactttaaatcttttcccaaatgtgaacaaaacttaccctgctgattgatctgttgattttcccattcatgaaacaaacagagtccttacatggcaggtggaagggcattaaggtttactcagcatctctagttgcagctggatgtgtaccttatttctctgtagtaaaagaagtcttgacacctgaattaaaaaattatcattaaaaagtttaaaggaaggaaacattataagtgttcgaactagaaaatgatgttgacaatttattgcatttggcccctttccataggtcttaatttggaatcctgcaaaagctgactctgagaaaagcacttgtatacaggtggattatttgaaagtgatcccaggtaccatagtgagtggagtagggggagtgaagcagagaaaggagaaaggtcattaaagtgtacttggatgagtgggccactgatacgaacaactggggttcaacccctcttggggccatctgagaggctgggcatgtaagggaggaagacatcagcatgtgtgggaactgtgcacctaagctgcaggagtcaccttagatggtggacatggtgtaggacaccaacagggtcttgtacaccataataggaattgcttatgtaatgggatcctacccttcatgtggggcagaaaaatatcaatgtctgctggggaatgaaaaccaagatccagggcaacaccatgaatctggtaaaagtctgctagtggtcagtttgccttaggtaggttgttgctcttggccacagggtgtaaaggaggctttggacttagtgatcccagaggttattccctgctctcatgccagtattcttctgcagctttcctcatcaatgtttatatatttctttcttttttctgaaacttgctctttcactctgtctctcccctagggaacactaaaaatagcctgtaggttaaggaatctccaaaacacaggtgtgatttgtttgaaattctgtttgactcatgtgtgttgagttacttctaaattcaaggtattgtgactacttgaatgatattttttagaaacaaaataatgagaaaacttggtctgacaagggagatttttctgatctttgtatgcatttatttatgattatctgaagcgtgatgtaaaataacttatgtatatacatagcacagtgagttctggatggagagaagactaattatttatagaaaaagtctttttaatgtaaaaatattacattgaattagatttagttacatatgatcaaattgtcatttctaaataaaacaaaattctgaaggctgtccttgaaaatcaaagagatgtgtcacactagctgcggggggtgcaaaggtatgctcactaacattaagtaatttactgtccctttggaaggtaatatatattcccctaaacaggaaaagtaagtttgcaagggagcatggtttatgtacagtcacaggagtagggcttgtaaaagattctgtagatattgaggaggaggtatgtgtgagacagagcatgggatttaacatgtatagtaatgacctgcttggagatggaaggatttgagccaagttttgaaatgtgagggttttgtttagagactctttcaggaaaatgaagcaaacagagctgagcatcatcctggtagcctgactgaagagtacttggcaaattagagaagatatagttgcaaatggcagggaagaatgtgaatgctacgcatagtgcttttgggaaatagtccttgatggtgtctcttttacagttgaagagacagaatacacacacacacacacacacacacacacacacacacacacagagtcgcttcagctgtaaacacatatatatgtagttttaaatacatatatgtgtatacacacacacacacacacacacacacatatatatatatatatatattttttttttttttttttttttttttttttgagatggagtctcactctgtcgcccaggctggagtgcagtggcgcaatctcggctcaccacaagctccgcctcccaggttcacgccattcttctgcttcagcctcctgagtagctgggactacaggcgcccaccaccatgcccagctaattttttgtatttttagtggagacagggtttcaccatgatacacttatatattttttgtctctggtgtgtgtatatattatgtatacacacacatatataacatacgcacccacatttataacacacacatatatatgtatataacaaatcaaatttgatcttagcactaggactctgttgtaccaataattcagggttttttttttttagttctaggtaaaaacagtgtcattgatttactatcagtgaattcatgcaaattcatatatttgcattggtcgagtgccttgtactacaactacaatgttgaatagaacatgttctctcttttaggggagctcaagatacaggcaaacaaatgactacacttcagagccatgtcataataaaagtgcccatgaaatgatatacaatctaattctaatcagattctccaattgacttgctattttattcctgttctcaatggactcccatgtactttgtaaggagacagaatgtctgagcagagaatctttagagagaaaatcgtcaaataccatcttggataccaaatgtccatcttgtacttgtgaataataattcagtctagcaggatgtcctcttgcaaactgaaatgagcctacagtcccatctgtgggaaaacaagaggactcctaagtgttacacacaggatgttgctgatcttgggtcacctggctagcacagggcagctgtctgcagtcctttacctctggctggatttcctccttcaacttctaaaagtccaaggcttgaggacagttccctggtgaagatcaccagcatcttctgtgggccaactgaattgctgaggtgggaagtagtaaaagtcagagttagggtctagtttgtcctccctctctctcattttgtgtccagctttctttcccaactgccaaccttgatttacagttcagttaagtcccaaaagtagatgcaacagcaacaatcttcagtggacttcaacagttccctcagttttgtaagagtgaattgctctgaaaatccccgattctgtgtcactctaagtggctctgcctccctgatcatgtgtcagctgcattcaatcctagcaccagcccaaccttcaggccacctccaccatcactcactgggcgatgtgttctgtgcttgaatatcttcagaacatgcagatttgtcctaaacaggcctaggaaatgaatatacaattatacataaatttttattttatcgaaatttgttgtgagtaaaatggcagtcccttatctactgatggagtaccttctaaaagctttccttcttattctttatcaaattattcatttaatataaattacttatatatttttatgtattttatgtattttttcagagatgatcatttgggttttgaaaaattatattgtaataaaaaatcaaaatatttacatttatatgaggataattcctttgtccatgaatttatggacttatttaatggtagtctaattttcttaaagcactaaactctagaggcatgggttggctgaaacacacagatgactttgttgactctaacccaactatcctagagtaagattggttctactgggtgaaatgatccctcttctccaatgcttctgataccccatttcattgtctgcctacacagaggggagagggcaacagctgaggtttcttacagtcccaagagaaccatttttaaaactcagtctatataaaatatttcctggatgttttcaccaaagctcattaatgtaattttcacatcattattgcagctaatgatcatgtaagcgttcctgatcatgtggaaaattaaagatgttaaattaaaatattgacactgatgttagtaagtaatgattgtttataagatgtctggatttaaaagctttgtttacttaatttgttaaaaatggaagtttacttgtctttggtgtagaaaattaaacatgtgactctgaactttgtagagtgcttaacagcttttataatacttttataggggatttacatttgttatgggaatagtctttttactgactctgcttatattttcagaaatgtgtctttagccactagccgaggacagaccaataaacagcatccaaaaatgttaatgattatatatggttccagaatttacaatggtttgtgttatgattttttttaattttacagtggctggaaagtgaaacacattcaataaaaactgtatttcaaatacccatacaatgattctacttttcactttcagcacagtattcaataagttgcgagagatattcacatttcactataaaataggctttgtgttagataattctccccaactgtaggctaatgtaagtgttctgagcatgtttaaggtgggccagactaagatacgatgctcagaagattaggtataataaatgcattttgatttataatattttcaacttacaatgggtttatcggaacatagccccaacataagtagagaagcatttttattatagtgattttacatggaggcaatggcaggaaatggaaccagctgttcaaaagcatactttgtttgtaacttaaatgtttatacatccaatcttcttataaagtttgaatttttttaagataactatactagacttaatgttgtggtaggtttgtgactgtccttgattttagtcctcaaatatctatagcagcagcagtttgtatctgaaattattacaaggggatttgcctattagaaatatgcctaagttccattattcattaaggtcacagcagcaattctgattaatggagctgattcttgatagctgtgaggatacttccaatacatattataacttttacaacagagaaagcccttaatttccttacctgtaaaatctgagtaataattcctgccctatgaattgtaatgaaaatgagagaagctcccaaaatgatctagatgagacaatcaggtggagataagaccaagatgctaggaagtcagctagccactttctcacatctagcaaactgctcctacctactatccttgcaagaggcagaactcagatttgtcatttttaaatattcagtgaaccactgggcttattcaggattatttgaaactataaatacatatattttttaaaattcttggattcaaggggtacgtgtacaggtttgttacatggatgtgttgcatgatggtgacgtttaggtttctaataatcccatggcccagatagtgaacacagagcccaatagataatttgcctaccttaactccccaccctcttttggaatccccagtatttactgttgccatctttgtgttcatctttacccaatgtttagctcccactcataagagagaacacgtagtgtttagttttctgtgaaaccataaatattaaatgtaagagtaacaagagtctactgaatagctacagcagcattccttaatgttatctttttgaataaatacaattttgaaagcttcagccctgcacatcaggtcaatgcacttaagtagctaaacaagaatgtcataatttggtgcaagactgcacttcaggtattccaagtatatctgtgagagtagcagaaaggtccaaatcagaagagaaaatttgccatcttcattcagaatttcttaatcttactggaagtacataaaatctgtttttgttttaaataccctgatggaatagaccaatttggcagtctgaaaaagaactaaaaaagcccagctgtccaacaaagtcatgtctctaggaagagacacactgagggaaggatgtaactgagagaaataagacataggcttcagatttcctagttgggccaatgagaagagtgaacagcatcattatgtggagaaagtgaattatagaacctgatcgttatttgtgagctcattgatgtaatgaatttgcttacacagtttatatgtgacaaagttttgtatgtacccacttctccttgtccttaggcaataaattgccaagagtgtacagacttggccttcttgccgagaaaatttgtggaaactgccttttcagaaagaagcaaaaattagtacaaaacattgggactattttttttgttttgccttgtttaatttctttttttaagacagtcaaacccctgagggtgcacccttggaataacagaagtttaggataggaaagagtctctatggtcagcttgccctattgaaggagcacccaagaccatcagatggtctgcagagaaagtgtttatgatgtaatatcaatacatttgtgaaacctcatatgtcataatgctctcttgaagagtgacaattcatattatcatgttaaagactttaagtcctacattaaagaaaacactttaagtttaacccagtggttcccaaacttttttggccaaagatccctttaatccctaaaacctttgcatacttgtaaatgtttatttaatccaagcctgaatttgtctttagtaacttcctgcttaacatatggtccttagacgaacggcatcagcatcaccaagggcttattagaaatgccagttctcaggtccagtcttatatctatcaaatcagaatctgcattttaacaagattctcaggtaaaatgaatatgcatgctgaagtttgagaagcacaggctcagtattccttctgactcaccatcttcacttcgttgaagttaaagacctgctgaggaaatgtcttatgcacagcatttaagcaatattacaactacaggcaagttgtacctgcaaatagtatttgcacatgctgcctctctagtttctgtgatgctgggagatgtctttcagaggcctgagtgagtctttacaacctgctcaatttgttttgtgaattatgagtgatgaaattctagattacaaattgcagacaaagaagtctgtgccttttcccaggcatagcgtcagctggtgaagtttatagagccagatgtatttagtagaaatcagagcgtgactaacacttcaagaagaagatttgcagatgcacaaaaaagagcagagaagtccagaattgcagcttggctttcaaatatgattattggttttttctgacaggtgaaacatttataaggaatcaaaatgctactcattatgcaaaatgcctgcagaaatatctctatcagaagcaactaaaacgtatacagttgacccagacggagaacaagggccccttctcaggtattagaaatggtctatatattgataggggttacatgggtctatgcatctgtcaaactcagcaaattatttaaggtctgtatgtgatttcactgtctatgaattatacctcaataaaaacgtataacgtttatcttatgaaatttgagtgcagctgatattagatacagcaatgtgggctgtcaagaatactttaatggagatgtgcatttggaaataaatgcccttcacctggtatatggagatatttttatgggagggaatagccattgagtaggctgggttccagtgacttcatggtcatgccagtcagcgttaccagcaatccagatggcagagggggctgtagcatagactctgaattattgattctgggttcaaatctgagcctagttcccagtgacccagcacatgtgatttgacctttctgtgccttagtttccctatttataaatggcaatgataaaaatatttccttcacaggaacgtttggaagaccaaatgatttaatatttgtgaagaacttagtatagttctggcacagagcaaacactatatacatatttatcagataaacaaagtgactccaataagctagctgcaaccaccgcaactgtcatctacaacttaaccagttttatttttttacagcacttatccttctttaagatgatcttattttgaataatttatttgcatgtcattgtcagttgcccacccacctacttcataagccccaagacataagggactgatctgttttgttcttccctgtactcctagaacagtgcctgacacacaatagatcataacacactgaatgaatgaataaaggaatgatgtttaaagcaaaacaggttcttaaagaagtgagtcctatgatattaatgttccaccaaaatcatttccttaattactggttaaattgttatgtgcctatcctgtgtgctgagtggtacgtaaacagcttactggggatgaggtatctggattgatatgaccaaggaaatttcttgagtgagaaggagccaataattggaaaacccctgattacctaatgcttgtagcatgtcccaggatctgaagaattttttatatatcaatattttgaataaaattcgtatttgtcctcagagagacaaaaacttctgcttttaagaatactcagaagctaaactaagacattcattataccatctaattgtgctagattgacattttttccttcaggataataaatcaagtaagattaagcaatttatactatgactgggaggaaactcaaattaacaacagactagttctgccccttaaatttggcagatgctctatttccattaatctctgcacctggcttcaaatttcatgaggcagggtcctaatcacactcatctatgcatcgctcagagcttcctagagtgtcttgtatttaatacacacaataaatagatgagcaagctaaatgaattgaatttgaaagtgtaaatacatgcacaagagcttgagaccaaggatttaaagtaaggctttgtgttttaccaagactgccctctggaagaacagaggggtcacccacacaatctggaaattaggctcactccttccattttacaattccttattggccttggtaggcctacaggttattctcaaaaacctgacacacacacagaaacactcccacacccctcctcccccaccacacacagtgtagtgatggatttacttcaaggaccatgagttacgagataagccacacagagcagagcaagagtgtacaatactgaaaaatatgttgtggtgaagattcatgtttgagtcataggacgggaatccagatgtttatttttaggggtctcagataacatatctttacatttgaaaggcaacagggtatttgtttggttacactataagcatgtattattttgttgagactaaattacttttttttatttctatgatgcagcactcttttagtatggagaggctcatttggcaattccctcacctttttagtagaaatgaattttgatacaagaccaaatgagtgtctctttcttttcactaactcccatgacctgcattctgagttgttgttgttttttaacttgagatacatgagtcctctgtgctgcattctgtcatccccaatatcatttctacagaatgaattgagcaaagatggcctagcattcgtatttagcaagcaaatactatgtgtttagcaagtcttccaccaaaatacttagaaagatcatgttaacagtagagggtggtgactgcaagttgtccaggttcttggcgttttgcacaaagaattggacaaaacgtctagcagagcaaagaaagaatgaaggaacaaagaaggaaagcagggatttattgaaaacaaaagtacactccacagtgtgggaatggactcgagccacaagcagcagctcaggggcccaaatacagaatcttcttgggttcaaataccccctagaagtttcccattggccacttcgtgctcacctcatgtaactgaagcagtagcctgcaatcggtctgattggttgcagaaaacagccaaccagaggctgaagtgaagttacaaaggtcacactcccgtgcaaacatctgattggttgctttttgcaaccaatgacctgcattctgaggtgttttttttttttttttaacttaagatacatgaatcctctgggctgcgttctgtccttggctgctttttgcaaccaatcagaggctagggtgaagttacaaagttgccaaggaagactggacctgcaatcagtctgatttattgcagacagccaacttcccatctgccgcatagaaaaggtcaacttaggcgtggaaagttagggttttcctttcaatttagttctaggaaattggcatgaaacagtcttaggttccctgcctccaggccctattctcctgcctcaatcatgttatctatggcagtgcttctaaaactataaagtgcatccacatccctgtatgtgccagtgtggattcaccaggtctagggggcacctgagattctgtatctcaaactgggccctgggtgttgctatagaccacactctgagtagcaaagttctaaagggaaatatatttatcacccttccacaaacggattctatttaaaaaaagaaaaaagaaagaaaagaaaaaaatcatgttatcttccttaaaacatagtttcatattctttgcctctaaattaggtgactgtaaactccctaggcaatgaggagattcccagctatggtggtctaagtgcaaaacaattttttccacaccatcagcagcaatgtccacgctcattaaggctgtatttctggattttcctttgcaatgggcttccatgttagatcttcactacatccaatttcagaaaaaaaaaaaagttttgagaaaagttctccatgtgagagcacttctgtgctgtttttgaaacttccttctcatttttctggtatcttccagcaggcaatggggaaacctgcttaagctcacccctctttcactttgagctttatggtgacacttttctggcacatatgtcagcagagcccactttttagctgagttgaaaggaacatgggaagcactgcttcatttctgcctggaaaagccagggacacgatgaaatgtgattttgtttcctgaaacgtggaaggatggttggcgaaaaatgaaacatagcacagccatcgctcttcactaagggccaactccttgagaaatgtgctactttaactctcagtagtttctggacaaggcctaaaatcaatcataatcctaaaagaaaaaaaagttctatttcttttccagtggtatttcagagaataggaactctgttacaatttgatttgcactctgttcgcagaaaaccgaccacgcgcactggttttgcttattggtatgtttggatacacacgtgcgtgcacctgctcagaccacaaaattgaagctcagaatggaaaacagaggtttccattgaggtttcagctaaaataaatttaaatttaagcctttctttgccagtttgtgcttcaaaacttcagaaagtgaggagatgcaggtcaaagggcacagagcagcagatatgtaggatgagcaagtctagaaatctcatttacaacatgaggactgtagttagtaaaactgtatggtattggggttctttgttaaataagtaggttttagctgctcttgtcacagactcacaaagtaaccatgtgagatgatagatatgttaatttgctttaaagtagcaatgattttactgtctgtgtatctcataacatcgtgtcgtaaacctcaaatatatacaataaaatatatttaaaaatacatataggctgagtttttcaggacatagaaaagaaatatgaactggatgagaatgagaaactcacataaaatggaagaagattaccattattattattactttgagacagagtctcgttgtgtcacccaggctggagtgcagtgtcgtgatctcagctcactgcagcctcctgagctcaagggattctctgacctcagcctctcaagtaactgggattacagacacctgctaccacatctgggtaatcttgtatttttggtagagatggggtttcaccatgttggacgggctggtctcgaactgctgacctcaggtgatctgcccgtctcagcctcccaaagtgctgagattacacgcatgagccactgtgcccagccagaaaaagattattatatcaagatggttttataataatgaagaatagaaatctggacatactcagatttgtagcatagactgatggacagtcctgtttgctctcccaagcagaaaatctaaaaggaaacctggcttctaagggtttggagattcaaaccttgaattctgattctctaattacaagtggacttcagtgagttaaaaatacagacatcagctggaacttgaatggagggtaggggctttgctgggagttgcctggtgagggaaatattttaaaaagactttgagtaaaactgttgtaagaccaacaggttcgtatgcccatttgcacagtaacaaaccatttgcagcagagaaagagtttaatcattgcaagtgcagatcagggagataagaggaaaccctcaaatccatctccctgaaggagttctgggctgggatttttaaagggattatgaagagtgaggggctggaaatttgggattcttgattggttggagtaaggaggataaaatcatcaggttttggaaaatgaattatttggtaagtcagcttctcttggagccctatagaccagctggcgtcagtagttttactggtatgcaggacctgaaagaatatcttaaaggaaaaactgaatgtttcataatgttcaagttgttatctgtacagcagttgaggggaactatatcttgtgtaacagggtctatgtgattctagaacaatacacaaacatctatgaggaagcaggtcagaggaagctgacctaataatttgtgctgaatgtgtggcaagtttggtttattttcttcccccacaaccttcttccctgattaattttataaagtttatagggatggtttcaaaacaaaggaaaacagatacaaccaggttgggtccaaatgattcaggacattctcagcaacaacagcccccatgacttgagtctctctaataaaaaaagaaaagaaaaaatctgaggacaactgtaagggtagtcagggttttcattttttttttttctgtgacagagtctcactctgttgcccaggctggaatccagtggtgcaatctcggctcactgcaacctctgtctcccgggttcaagcgattcacctgcctcagcctctcgagtagctgggactacaggtgtgtgccaccacactcagctaatttttgaatttttagtagagatgtggttttgccatgttggccaggctggtctccaactcctgacctcaggtgatccacccaccttggcctcccaaagtgttgggattataggcatgagccaccatgcccagccaactgtaagggtttttatagatgtgtttacataaaagaaaatagcacagggaaaaagtgtgcagtgtcaataaatgggacaggattattcactcctggtttgtattccccatcccaagagaacgaccatttcactgcaaaggcattttaagagccatgtagaggaattgtggccgattgaataggaagttctacctggttcaaatgagttcacatctctcggggaagctggtgactgtggacccaggtagtccaggtcatctttgagaaatgatggagaacgtagtgtcagaggtgaggggattctgtggcctccatctagcattctgcttggcatctcctacaaaaacttctcagaaatatgagaaatacaggggaaaatgtttgaatgctatcccatggcagttaatatggaatctgttgtggtttgtggattagttgtgtgattcaggtgccattggaggtttctggaagagaagggccttttaaaagcctctgagaggccagtattatccccagaaagaatgagaggaggtttattgtatgcacgcaagcaatatctatgaatccctttacttgcttgtatcttaccctcttctgccctaggaacaggctcgtgggagaagtgacccaactacaccttcctgccagtctcgagcattttaggtgttaaccaccaaagtggctgacacatgtacttactcacttggttttaatttgcagagtaggaacaatggacttagatttttttaaacttctctaactctttaatcactgaatgaaataactcatgttggaaagacaaagaatttcctggtagaccttttgaacaagagctcatagatttcagtgccattggtagccaatgtgataccatggcattgttgtctattgtgttttttaggttgtgacctatttgtgggttatgaattcaattttgtggattgggacctgcaatttaaaaaaaagatgaaggaaatagaacataatagagtcaagcgccatgcaatacaaaatgtcagaggtatcccaactaacaagggtgaatgatggtttgtaaaacttcagttacgtatgtatacgtgcatgtatgagtgttctgagtgataatataaaatgcattttttactgaggagcatgatcagaacaatatcaaaccattgaccaacatcaacatatttctattagaaagatatttaaatgaagtttgtatagtaaaaggaagaaagaacactaaaatatttgcaaatctaccctgcacagtcactttaatcttttcagcttctaattgagatagatgctctatattaccctgtttattaataaaccctcaaagatctaaaaaggtgaattaactctcaggggctttaacagataaattaacttgaacctgcctagttgtctgtttcagagccagaattcgaacatggattcattttagccgcagtaagcacctgtgttagtcagaattcagtgtgggtaacagaagggcaggccagattggagagagctggaaacatattccaggtagagacaatggtgcctgatgaagcctaagggtctgaatgctggagtaaagccaggggttatttacactgtgactgggtgtgaatctacagatagatctgaaactagaagataagcccatgaaggaaatgggaaaatgtgccctgattttgagttacattagcaaaaaaaatcaaagctgagtccaagatggaagaacatctacataattagagaggacagaagtgatcacgaagacctaggggacagggagaggcctcaggtaatgcaaaatctgtacataatgattgaggtcaggagaacagatgctcttcccgggtcagttttaaggctgaaatgtttcaggaaaactgggaacaaagcatggttggaaatagcaggctaagctgatgcatcaggagactgcagatctcagtgttaccttgcctgggaacaggatgggccccaagtatggctgagaatgcaagtctcatgggtatatgtttaatgaacctagttgggagatgttaggaggaagactggttctgatgtgaaagtttccttccaaagaataggccaacctaactgcagcagtgctgattatgatggaaatttcctattttgattcttcatcaaaagaaagaagagccggtaccatggttcttgcctgtaatcccagcactttgggaggccaaggtgggaggatcacttgaggccaggagtttgataccagcccctataggaaacataacaagaccccatctctactaaaaattaaaaaattagcctggcatggtggctatgtgtctttagtcctagctactcaggaggctgaggcaggaggctctcttgagcccagaagtaggagacagcagtgagctatgatcacaccacttgcgctctagcctgggtgacagagcaagaccatgtctcaaaaaaaagaagaaaaaggagaaattaaaaagtttttccttatggtttatctttagtagtttgacgtattaaagaggtttatattttattattatatatgcattaatatataatcagatattaattaaatatgtattagtatattatacattaacaaacttacattgtcatcttcttcaactaattctaagcctcaaacgaagtgtaaaagaaaactgaagcatcaaaaaattagtcagcttcaggcactatcccaaatgttgaagttttccatgtaaataaataaaacctctaaaattaacaagaggctattttcactgttgcctgttggacacaagccttaattatgacagtgatctgaatagccaagttacactgtaaggctgtttccctgaatggaaacaccaaccttttttgcttttttgaaaaagaagcagaaacagaagcagaaggagagggagagggaaaagaattctttcggacaaaatgtatcaaatgtttgacttcactccagaggcaatttttaaataccaaaaattgtttcacatctattcccaataaggtttgccaccaaaggagtttgctctaaatttgtgactggatgtttggttttcagaggtttcaggatttcagaatcatggtaagggattgtagacatgtatttggtatgtgcaatattgggggacttgaatattaagtctgattgggaacatctctgggtttctgtatgtgtacacattctacacaatagtgtaaagttttctagaaaatttagtgtcagcaaaaattacgctggggtctgagtttttatgtgagaatcttataaagatcaaaatattagctaaaatttaaaatttgagttgaaagggcttgaatgctgtattagtctgcttgggctgccataataaaatgctgtagattaggtggcttaaacaacaaacatttcagtttggaaggctgggaagtccactatctgggtgctggcaaggtaggtttcagaacattccttcttttggcttgtcggcaaccaccatgtcactgtgtgctcagatgacctcttctttgtatgtggtggtgggggtgggagctgggaggtctctctaatatctctgttgtgggatttttccttagttcagctgaagacaggggtccttatcacatggccacgaaaaatctggcttgcagacaatctgaagcgtgaggagggccgggtttattgggtgaaagagggaaacagggacgctccgcaaggccagaatccctgctacagcgcttcctgcctgaagattggatcccaggttccacccaggaataggaggggccaggcttcccccgctgcaaacagcaccaactcccgtggctccatgccagtgcgcaatcctcccagtgtgcaggctggttggagtttttccaaggacctcttcccacctggctgtctcatctcattttgtaaggacataaatccaatcctatcctatcctattctatccgagccccacccttatgaccttatttaaccttaattacttctttctagaccctatctccaactactactgctttaacatgtgaatctgggagtgggggagaaaattctatccttagcagatgctaaaactcaggacttgaaactgctttaccaaatgattatgtgctgtggtctgaagcagtattattttttaacccagtgtttttcattcccatgtttttttcttttctaagaaattattttcttcaggatcaaagcgacagaaacttagaagtggcatttgaagttgccaacattaaacctttgatcagtccggcctagtcaccagccaaacaaggaggagagagattgttgctcatccatctaaattcacagctcaaaggtgcagaaatccagctggagtagaaaacatttcctgtactgagttaaatttaactgaactccatgcctggatgatttctgccagtggcgcccgtgggattgtgtgaccccctctggctttgctatctgcaggtttcttgatcacacgtggtatccatttatcagtcctggctggagccagtttcccagagcaaacagatgcaggatgatccgcactatcagcagaggttcaccaaagttctaattagaccaggaaggtttattaatacaattagctttagggaggacagttacaacaggaagcaaattccttgcagcatccggtcctctcttagccatgttagttgattaagaggaaagcctcagacttcaaaatcaagagcaaaattgaaaatgtctgggaatttaactttccagtaactgtaaagttttaaccgtgaactttctattaactgtaaagtataatttaactttctaataactgtagaacaagaaaggattctagaaaaatcttgggaaaaattattaatgaggggcctgagggcttaagtttggggagagtgggcttcttttgatttgcaatgtggaagctgcttttgctcatgctttctgaaggtcttccataaagaggggaactgcgaattgcaaagtaaagcccctgctgtggagtgaatttgcttatgtcacactctatctgagtgacccttaggaagttccctaatctcccatgcctgttttctgggttgtaaatgcaagtaataaaagtaactgcctcataggtttgttgcaagtattaaataagaaaatttataacggacataaaagggagttggcatagagttaatgttcagtaaatgacgagtgtatccttctcctcttcctcctcctcctcctcatcctcctcctcctcctcctcatggacaattggtttcatccatctgataatgaaacactgtgaattgcccccaggagtgctttaaatgatgtctacttgtacatagatgctcaaaatttttgaattctatcagtatgacatctagaagagtcatgggtagcaccaagggataagctctttctctggaagaatagtacatttctttctattaaaaaaacatgaattagtcaacccattatgtgtttgtttttgcccttattaccagaaaactacaagatgattttcaatcacagtgaggattagtttctgtgactaacatgtttctttctttctcattcttatgagtttgatttcccattcttaagcaaaaaagcacaataggtgtgattgtgtgtaccatttttttgaatgaggcaggaagatagttgacagttggttaattcatgtattcattctagttagttttgtgtctgcacttccttctggaatttaaacatttttgaagatacggtctctgttctattttttatttttcattcctataaagttttattgaatgcctatatgtgtccaacataccagatcctaaggtatgtttcacataagtcagattggtctctgtccttaatggtgttatcatatagcagaggacaaaatcataaaataataataatatatgaaagatatgtaagcatgtaaggtcaagagggtggaaatttcttctgtcttattcactgctttattgctactcctaagggagtgcctaaaacagattagatgtccaattagtatttattctatcaattactgtcccaggcattttacacatattagaaatatgagaactaatgtttattgagcaattcatatctgtataccaaacattctactggtatttcaacaccgtgaactagaaacaattactaaggttatgaaataggagttaacactgaagtctagagaggttatgcaatttgcttatggtcacacagctaataagagctagatagaggtctcctctagagctcatgagcttaaccagtacctccatccatgacactgtcttaccctaatactggaggagttgaggaataggcttccccacatcgtggataataaagctaaaattttctaaggcagggcctggttaatggagggcacatgcaagctgacactctcaggactccaaagtgtacacacttttcactataccacacagcctctcatgcacgtagacaatcacacacatacaaacattctaacaaaagtttgtaggaattgtgctgggaccatgctgtatagctgtagtccatggtgtataacatgcctgcagtagaatatctattgaaatgaatagagctacaaggttaatccattggagaaggaatttggtgtgatacttacaagctccccagtggcatgaatgtgtcactcttcacaacactgcctagttcttgtgtagatacactataagcattaagacaatttatccttactgtacaagactatggagtgtagatgtggtagacctaattctgagatggccttcagaatcccatccgttggtgtccatgccctgcccattaagtgtgggcaaaacctaaggtttgcttctacccggtagaatatgacaaaggtgaagggattttgcagctataattaaagtgtcatgtcagttgattttgagtaaatcaaaagggagattatcctgggtgagcctgacttaattaggtgaaagcccttaaaaaaggaactgggcccttctggaggcaatagactgttcttgaagacttgctgaagttagtggctcttttggagaagcctacatatcaaggaaatatgacagcctccggaactgcaagcagcctctggtatccaaggccccaacaaaaagccagagccctcagtcacagagctcaagaaattgaattctaccgtcaacctgaatgagcttggaagtggattattccccaatcaagcctccagactttaacccaatctggctgatcccttagttacagtcttatgagacattgacaggagagtgggtttagacgttaatatcccatttccgttaccagatatactgcaaagacagagatcattttttcaaggaagttgtgactaagcaccatttgaaatatcactattgtggttttgactgaccccagatgaaaagatgaactctcctaagatttcaggcatctttaaggatagattgtaatgatgccaggtgattcctagatgagatacactaaaattcctctccacacaaggaaaataacagtgtgttctctacttctcttggaagttccatcattaaggatattgaatatgaccaggcacagtggctcacgcctgtaatcccagcactttgggaggctgaggcaggtggatcagttgaggccaggagttcgagaccagcctggccatgacgaaacctgtctctactaaaaacacaaaaaagttagccaggcatggttaattagccctgctacttgagaggctgaggcacaagaatcaagaatcactttaacctggaaggcagaggttgcactgagatcgcgccaccgaactccagtctgggtgacagagtgagaccctgtcaaaaaaaaaaaaaaaaagaatattgaacatatgtttacataaattaattattttgagcaatgactatttctgcttcagaaaatctggacttcttaagttgtgttcaagaaaaaaaaaacaagacaacaaacacttcaggtttatccttttatgttgtgactatgtgggaagagattgttaatttaaaaaatctgttaacaccaaactctcttttttctcttttcctcttttttttctctcttctctgtctctcctcattttataggttttggtgtctatttattttttctccatgtattgccaccctttgctctaggcttacatacttttaactacaaatccaggaaggatccctgattccacctgttccagtgaaaaccctgatgtagctttcattagaccaacatagaatatgtgccaacacttgacctagccaccgtagccatggaattttatttatttatttatttattattttctgaaacagagtctcactctgttgcccaggctggagtgcaggggtacgatctttgctcactgcaacctccacctcccggtttcaagtgattctcctgcttcagcctcccaagtagctgagatcacaggcgtgtgccaccacacccagctaatttttgtatttttagtagagatgagctttcaccatattggccaggctggtctcaaactcctaacctcaagtgatccacccaccttggcctcctaaagtgccgggattacaggcatgagccaccgagcctggtccgtaaccatggattttaatgatctgttcagccaggcctggaatgcacgccttcccctgtagccaggagtaaaataagcctatcagaaccatgcaggctggagttacattttcaaagaggaaaatggataaaaacgttccattactgagacaacctcagatattttcctcagagtggaaatcaggaaaccaacttagagtcatctcaagattagagggaatttgggctagaaggagaatattctaaagctactatttactaaaatattacctaatagtacaggaatagacaactgtatcaatggagtagaagagattagaaagtgttcaaacaagcataactcatttagaatggatgcatgaaatgctatttcattgtagcactattgttttagaaatggttttattaaactatacacaaatatatgaacacaaatccattacagtactgagtagtggaatcactatttctcaaataactagtcatccagtacagtagactgacatcttactgtttttaccatctatttgttctctctggtatggtgtttatttctaccattatttgtacttatatgaacatttttgggctgagatggctatcaaaaatgtgcaccagagtggcaaagaaaaattccctattcaatataaaaataccacttttactggggctctgggaaccttcaagacagtgagcaaggaagtattaggtaaaattaccaattatgtagctaattagatatgaggggaaatccttgaaaacttagtaggccacatacatatcactgcagcctctaaagattgacaagtagagggaaataaattgccaataaatgatactgagaatatatgtccaaacagactatgccattataaggtaatcactccctgaaacataaaaaaagtctattttatgaattttatatacttatagtttattttattatttgtagaacttttaaaatttatatcttcatatatgaatttcatttttattttgtgtgttctatcttatatatttgtagataatttcataaatgtttatttttgctagttaagcatctgatataaatgacatttccaattaatagtgaaatggtgtttccaggaaagatattggaacaatgaatatccgtatataaaagtaattttggcaacctacttcacaccatataagcaaataatttccatattatatacatacctaaatattgagggaaaaccaaaattgctagaatatacataatatactttttataactgtagagtgggagaaaacatttttagacatagcgcaaaacccagaagcaaagtaaaacactggtaggttatctgcttaacactgttaaacttctaatgggcaaaagacaaagcagacaaaggtaaagacaagttacaggctgggagaaaacagttacaagatatatcagaaaaagggaaacatataccatctctaacatactcttacatggctcttacaacccaataagaaagtgaagttctcaggtatctgtgaatgcaagccacagttgtctcttagccacaatgtctagggtgcgtcaggattcagacgactgcagttcctggccaagtaccccctagctttgctgaatgacatgcctctttatggcttatggacagcaaccattgggttcaggtcttcgccccatttcctgacccaaggggccacaaaatcctttgtcctcaccccaggccacaagaagagcatctcctcagaaagtggccactggttatttcacctggccccaagacgatgcaaggcacccactctgctttttttgtgatgagatggagcatgactggccttgcacatgaccttcagtcactgcctctttgctctttggttgttgactttgtcggcagggaattcagagggaaggagagtcagcgacgtgctctcgtaaggtcatcttagaagaccactctctccaattattttaagcagctctttagagctttctacattgtgaagttctttatcctacctgtgtatccctagggctttacagagtggagattcagtaaatattttgacaagagtgagcaaatgatttaacagtcgatggagtgcaaattgccaacaacttactgtagcgtttccatccacagcattcagggtcagtggctaaaatacttgtcgtaaaggtgccaagcctccaggcatctagcagggcattagcacaccgaagcatttattagactcaggaatatactctttattggctcatttcaaacaatacctaaaaaagaaacctctttttttaaagccttcaaaagatggcaggatgtattttttcctaagacccataaaacaggtaacataaactgttactatttcataagaaaaacttaggtacagaaatactcaaacacttatccaagggagctggaatttgtgtcaaattttcttgaggaattacatggctcgtactatttagaccatgttctaaacaagcatttatcgctctttgaagttgtgtcgtatttagaaatttagattcatagtaattagatatttagatagattatactggaatatttgggtggcatatggacagcaggtctgtaaataaaatttaaatcttcattactatattttctacattctgccttatgcttgatttaagcttttttcccttcttttcactggttagatttttttttcatttattttttcttctaggtcgttgacctttttataggcatagaaaatgccttgtaccgtgcaccaaagttcttaaaattttaaaagctttctttgactaagtcatcccttgccctcttttgaagctattctgacctctattttctattttattttaattaatcatatcttaggatttgtaggcttatatgtggatgcatgtatattatcttgttaagggtacataaggcagttatacaaaagattatgttggcttcaaagaatgttaaacaaaaggaatgagaagattcctgaataatatagttatgcatactcagagcttctttcataagggcatttgaaatgtatgctgatcacctcaaggtcgccatgaaatgggaagatttaaactagtggtgtttggacagaaacaacttttaccttgaaagccagcaatcaatgactgaaaaatgtatatctaaggctggaaaatcatttcagtattattaagtattctgatgacaaaaaaggttcaaacatttgtgactcccatagctagtattgatatgggtgatgggaaataaggatgtatttattttatttggactttagtcatgtttttattgtctgtaaaaatgacttgactgttacagctagaacattgaagaaagaagggaagcaggtcaaatgggtccccagtgattccctgtggcacctggactttctccaggaattgattgttacatattattccatcaaacaccttttaaccagtccagttcttgtctatggatccagacaattcagtcttcccagggcttacccatgtttccatatatccagaaagtttgtatattatggctagaaaagcaattaaaccactttggaagggttgggggaagggagggttagggagagacttgttaaaggatacaaaattatagctagataggaggaataaattctagtattgtatagctttgcaggaagactaaagttaacaatcatatggtatatagtatcagatagctagaaggaggatatttaatgttccccacacaaagaaatgataaatgtttttgattttatatatatatatatatgataattaccgtgatctgatcactatatgttatatggatcgaaacatcactatgtactccatgaatatatacaattattatgtgtcaatttaagaaattaaattaaaaagagaaattaacccagcctcaccattttacagcagagggacttgaggtggaaaaaattcaagaaactttactctcgtcattcaacggagtgatcttttgaaaaaggtagcattacaagaaatccagtatatacccacaaatacgtggccacatttcttgacaatgttccaattattattgatatctacaattagaattaaatcgttgtttctaaccagtaatattccaagtaaagtagtaacattgtttattcattggcattaggcatctatggttagctctacagaattatagttgaaatctatgtgaaaatatcaatttttacacttaccgaccataataggatacttacagaagagcttgataccagactgtcagccaaagattttctgaatttggtatgaattttctaaaggtggagtgatttgcttcaagagaaaattgctttgagtgcattttgcagtcaagaactttgacaccttgcaatttactagttgcaaagataatctgatcacaaagtaagaaatctgatcgttgtaattccaatttatatcaataagaaataataaataatctttattttggaggtttgctaagtgactgaaagtttatctaaatacagacggttttgcatgaacgctagggactgaatgaaacactgtttgcctaccaattaaccaggcaggtgtgaaacataagcagtgaccgaccataacagacgatctctcagatattgatcactcttttaacagaaaaattcctatgggcagatagaggagggggagagggcagcattctcttgagattgtcttagggaaggatgatcatgaaactctttatatctgaaaaaaattttaaatccttttaaatatcaatccaggaggattagctaagcagcaataaagcaccttataactgttacatagttaattcaaagaagcattgtatcaagataaataaatatagaaaacaaggaatccattttcaagaaacatactttgttctagttctgacttcagatttaaaacacacacacatacgcagaagacacactgaatatgattgaatctagaatatagaaataaaataattgaatatattccatttgttaatgtgtgcatgtgttttcaagacatggctcaatgattctgtagttttttccttatttttattttgagaattttctagaaaaaatatgtcttaaatacttaatttttacttcttggttatcttagtccatttgtactgctacagcagaatacatgagatgataatttctaaagaacaggaatttattttctcacagttctgaatactgagatgttcaaggggccggcaggtttcgttgtctgtgagggtggctctctgcttccaagatggttcctctagaggagggaacactttgtcctggcatggtgggatgtgggctcaaaccctgtatgaagcctcttttataaaggccttaatctcatctttgagagaggagccctcataacctaatcagctcttaaaggttctacctcttaatactatcacaatggccattaagtttcagcatctgaattttagaggggacatactgaggcaataacaaacattatgtttttgagaaggtcccattttttcttaatttaaagctcagtccaatgaatatctgtaacaaagggttagtgaaatcccagtccaaaattatcatcttttgaaggtaattcagatggacatttcttgagttatcaaaatgtataatattatctattcaaatcttttctgttttattaattaaactcaggagattaaagtaccttgccatgacattgaaactagtaaaacagccaaatatgaaaaccaagcatgctgggaaaatcctaataatgatggaatggctaccaagtctttgttattcccttggatagtagcacaccttggaaagacttagcaaagcccagatttcaggaaagtagaaaaattgcatttaatgctttgattataaaattatcttgtgagtttcttgtttttttttttgtttttttttttgagatggagtctcgtcctgttgcccaggctggagtgcagtggcacgatctcagctcactgcaatatctgcatcctgggttcaagcgattctcctgcctcaccttctcgagtagctgggaccacaggtgtgcgtcaccacacccagctaatatttttgtatttttagtagagatggggtttcaccatattggtcagactggtcttgaactcctgacctcgtgatctgcccgccttggcctcctgaagtgctgggattacaggcgtgagccacagcacctggccatctcgtgagttttaatgcaactggcagttgactgtgggtcctaaccatgggctctgtttttctcaaatgtaaaattattggccgatgtggaagaccatccatcctgtagggtgaggccctgctttttataaggtaatggaagagtatgctattcaatatcaagttaaaaataacttttaccagtgtggaaaagaaatgagcagggaaacctattgaccattaggcttagttttctgtttggtgccccaacttcactccatctgctatcttttggatctccagggttttctttcctactccttaccccagaaagctgcattattctggctccctgagcaactgacttcagtctgagtttcaccagtgggaggtgctgtcacgctattggagggcagaagaagagcagcatgaaatggttatttggttattccctattcccttctgcttctgcatcacatttctggcaatggctgaatatctccctaactacagctcccaacaggcaacctctctttcatggttccagctcttaccagttacaataattctatttctatcacaaccccttcttccacccctaccccaattcttccagtccaggggtcacaatagcaccccacagtggctatttcctgggtttaccaacttcttttgttggttcttccagcctgcttacacctccgacttttttcctcattaaagtctcttcacttaatttatctgatttgaatttgtctctttactgagatcttgaccaatacctgattttttttttgtactttaagttctagggtacatgtgcacaatgtgcaggtttgttacatatgtatacatgtgccatgttggtgtgctgcacccattaactcgtcatttacattaggtatatcccctaatgctatccctcccacctccccccaccacatgacaggccgcggtgtgtgatgttccccaccctgtctccaagttttctcattgttcaattcccacctatgagtgagaacatgcagtgtttggttttttgtccttgcgatagtttgctgacaatgatggtttctagaaaccatagcttcatccatgtccctacaaaggacatgaactcatccttttttatggctgcatagtattccatggtgtatatgtgccacattttcttaatccagtctatcattgttggacatttgggttggttccaagtctttgcaattgtgaatagtgccgcaataaacatacgtgtgcatgtgtctttatagcagcatgatttatagtcctttgggtatatacccagtaatgggatgcctgggtcaaatggtatttctagttctagatccttgaggaatagccacactgtcttccacaatggttgaactagtttacagtcccaccaacaatgtaaaagtgttcctgtttctccacatcctctccagtacctgttgtttcctgactttttaatgatcaccattctaactagtgtgagatggtatctcattgtggttttgatttgcatttctctgatggccagtgatgatgagcattttttcatgtgtctgttggctgcataaatgtcttcttttgagaagtgtctgtttatatcctttgcctactttttgatgaggtttttttttttcttgtaaatttgtttgagttctttgtagattctggatattagccctttgtcagataagtagattgcaaaaattttctcccattctgtaggttgtctgttcactctgatgatagtttctgttgctgtgcagaagttctttagtttaattagatcccatttgtcaattttggcttttgttgccattgcttttggtgttttagacatgaagtccttgcccatgcctatgtcctaaatggtattgcctaggttttcttctagggtttttatggttttaggtctgacatttaagtctttgatccatcttgaattgatttttgtataagttgtaaggaagggatccagtttcagctgtctacatatggctagcaggttttcccagcaccgtttattaaatagggaatcttttccccatttcttgtttttgtcaggtttgtcaaagatcagatggttgtaaatgtgtggtattatttctgagggctctgttctgttccattggtctatatctctgttttggtaccagtaccatgctgttttggttactgtagccttgtagtatagtttgaagtcaggtagcatgatgcctccagctttgttcttttgacttaggattgacttggcaatgcgggctcttttttggttccatatgaactttaaagtagttttttccaattctgtgaagaaagtcattggtagctttatggggatggcattgaatctataaattaccttgagcagtatggccattttcatggtattgattcttcctatccatgagcatggaatgttcttccatttgtttgtgtcctcttttatttcgttgagcagtggtttctagttctccttgaagaggtccttcacatcccttgtaagttggattcctaggtattttattctctttgaagcaattgtgaatgggagttcactcatgatttggctctctgtttgtctgttattggtgtataagaatgcttgtgatttttgcacgttgattttgtatcctgagactttgctgaagttgcttaccgaaaaaagtccaggaccagacggattcacagccgaattctaccagaggtacaaggaggagctggtcccattccttctgaaattattccaatcaacagaaaaagagggaatcctccctaactcattttatgaggccagcatcatcctgataccaaagcctggcagagacacagcaaaaaaaagagaattttagaccactatccctgatgaacatcgatgcaaaaatcctcaataaaatgctggcaaaccgaatccagcagcacatcaaaaagcttatacaccatgatcaagtgggcttcatccctgggatgcaaggctggttcaacatatgcaaatcaataaacgtaatccagcatataaacagaaccaaagacaaaaaccacatgactatctcaatagatgcagaaaagccctttgacacaattcaacaaccctttgttttaaaaactctcaataaattaggtattgatgggatgtatctcaaaataataagagctatttatgacaaacccacagccaatatcatactgaatgggcaaaaactgaaagcattccctttgaaaactggcacaagacagggatgccctctctcaccactcctattcaacatagtgttggaagttctggccagggctatcaggcaggagaaagaaataaagggtattcaattaggaaaagagggagtcaaatcgtccctgtttgcagatgacaattgtatatttcgaaaacccaatcgtctcagaccaatacctgatttttaagcctaaggttaggaacacataggaaaaatcaaggtgagtattaaaaattagtagaaggagaccgtttagtgtactactcagattagtagctctttgtacagtcatcctcaataaatgggtgcttctgatgacttacttttttttctttctttctgataaattgttcttattaaggaattctattaagtcatcatggaagatgttatcttctaattttacttgatgcacaatttggaaatataattagtttactgaataatatcatcaaggttcaaagaggactcggtgatctggaattctagatacgtagaatagaaattctgaaattgcatgcaaatcttaagtatgtgtgtataaatatacatatactgagtgatttgctttgcaacatggtgatttggctgtttagaaatattaatgatatttgaacatcattaaatgaagtcaaaggccagctataccctgcaacagtcagaccacatatggtgacatgctgccacttaggggcactatgataaacaggtaaacaaccaagagagctgtgtggcaactagtttcaagctcagggttttaagagctagatttaggggcctgggttttactcacatcttcctccggtgctagctgtgaaatttggacaagcagcatatcttttgctcatctctgaaatgggagacctaagaccatgggaatactcattaagtgaatgtacatgaagtgatgcctgacacattccaaaaactctccagacaatacctagaatactactaataattaccagtgtgtaattggtctggaaaccacatgttgtgagtaacagtctagggaactgggaacaattcagtttatggacaaacatactgagggatagagtaggccgctttcaaaatgtgaaagattgtccaagaggagagaaaattgttctaggaaggcaggagactctcagtgaaaggtacagaggaatataatttggtccagtagcagaaatacctttctaactcctagagctgtccaacaaggaaataggctgataagcaatgtccttttgagccattagtcaacaaaggctggataatcactatgcggaatatgattttagcaggaactcctgcaataagggctgaagtgggggagggcaaggacaggggaaaaggtcacaacatgacccttaatttccctttgcactctacaatttcagactctatgtgtgtgttggacagaatatcaggaaaatggctgccacctttgtttgcattcatgttgtcctctttcaaatcaggcccttggcaaaggtcctgagacacattgtccaaacttgctattgacaatcctacatatattttcctgttcagatgctttggcctgccagaggctcactgggtgtcatacaatagtcttctgtgtcaccagccttgcagatttcttcaagaaactgtttgttgagtaggcgcttactagctggaacaaatccctttgcaaaggtgtaccttccttttcttgaacagaatgaaaaatgtgttgagcaggaaaagaaacttcacagtatttgtgtttttcttttggccctttctgctaggtatcctcactctaattgagcaggctctggaaacctgaaacgcacatcagtcttgtgcctttttctgtttcttccactagcagttgataattatagcttttcgtagatactcagcacattccatgtttttgatgggagcagagcctttgtatggcaaaattgctgatatacttttaactaaatctgtagatgtgttatgtttagaaggcagcggaagaagcctgagctggcagaataattgctgtgttagggcgccactgaagacaaatagtgtgcccaagattgtgaaaatcctttcttataaaaactttttccaacaccagggttccttttgggacagaaataacaatatctgttctttctgagaaaacttggagagaatgtcaatgtgatatctcagggataattcatttttgaaaaaggagaatcctttctactgaatactttttataagggacatttttagctttggaactgcatttctcttccctgtctggatgttagctgtttgtatgagtggtgaggacaaaaagtaaaggattgcatcccacaaaaaccaacctcaatagtttaaggtcacacagatggctttgaggtaagaaaggaaattacatctcctgaaaggcaatgcacaggctattgaataggatgaacttggaggtctcttctagtcctgagattttatgattccatgatcacagaaactactagtgaatgtgatacttcatatctcatccattggctatttcaaatggcaactaaagtgagaagggaaatcatttattcttaaatgcaaattcaaactaacagaaattggatatatttcttggtgttcatgagcattgccagtagtaaaatatatgtttagagataagaaaataaaaacaacttatacttattgaatgcttatgacataccaggtcctatatcaagcattttatatgcatcatagattctattattgtcaacatcttatggaggaggtaactgaggattgtagatattctgaagcagtgtcgtgaagctgacactaaacactcttggctaccatagcatcctgcttctctgtagcagacgctggtgattcatcacaccacatttctttggcactctggatttcagcacaagtgctgtagacagttaattgcctatcgctagtgtcccgcttccttcaagtgcatgtgggaaagaaggagagggaagagaatctgaaagaccgttcagcaggcaggtgcaactcagaattaagagagaataatatactctacctaaggacagccctcaaccagtggaatgatggggatggtttccgggtaaactccgaccctcattgtcccgaaggagaacacttccggggcacatactacaatcgtttcttagagtgtccctaacaggggtgagccccccactcaatacacagtggtaagaaactcattcctgcgttcttctaatacatcttccttccctatctcattgtctatgctcctcatttctgcatcctaggatcagctcccaaataaacttcctgccctcaagtccttgaccaaagtgctgttttggggaggagtcaaagtaagattttttaaagaacacacacgttactgctatgtagttacaggcataatcttactaatggactataatgtccatcataccatggggttgatggtcataaaacctaggcgtatttgggaatatttctgtgacattaaatctctaactatataatagaagctaatggtagtatattgaaatttgttctttggaattcaattattcaataaaataagagaaatctctaccacacattagcatgaccccgttgaagtcttcagaaagcctaatgatttagcatgactatttcaagatcatttttcctaggcttcctcccatcctactcctggaagtgctctgctattaatttcctttgtggtcttagataagtctcagactgcaggtgaaatgattaaattctcatttctcttgaaaaatttcacacgaagtctcttttcatctatttcaatacctgatatttaatttgaatggagtataacaactacattgatatagggaaagttttattgaatgaacaaagccatcacataaatttttctttcatttttttttttgtcagtctctgaaattagtgaataggtagagacatccatcagttggatcattcttaggtaacattttgtttataagaacagggcagtgctggaatgtggatttacccacaattctcacgtgagatttctaccattgtactgctgttttcttcttgtctctgatttttttcaatctctgctcctcaaacatccaggtagctttgatcagtgcttcaagcagagtactggagtaagtaatatatttttctataaccttgtaatgaaagcatgatctcttcttaaggactctgtacttagcgaggcatctatcggtgattgtatactttgtagattttatttgggtggttctaccatcctccatttattacatatgacaaactcagtaagattaggctaagaagaactggttcctagaagctaatgttaccctggacagttaacaaaatttttgtgaaagtactgtagagttagaaaacacaccaaatagtacaattctccacactggatttcttcaatttactgttaagttgtaaaaagtaggcttgtacctgatgaaaacatttggcaaatttgtatgcagtaccagtgaaaaatatgcacaaattggcaaaataaggcaagattctaactgctgtccatgttcaagaactataacagtagtggggtgaatgctaaatctttacaataatatatagattgtacatttgtttttcatggattataagacatttttcatttttcagccacacggtattgattcatcacttccatattcagctatgcctatatatgtccatgtcacaaagttattttcccattaaaaatttactctgtccttgcaataagaaacacaaaagagttagttcaaaggaaaaaataacaatttgcatttggataaaaatggtaaatagatttatttttgactcatcctgtgaatccttttcagattgccttctttattttttattttttgagacagagtctcactctgtcacccaggctgaagtgcagtggcacgatcttggctcactgcaacctctgcctcctgggttcaagcgattctcatgcctccgcctactgagtagctgggaccacaggtgggcgtcaccacacccagctaatttttttgtatttttagtaggtatggggtttcaccatgttggacaggctggtctcaaactcttgacctcaagtgacccacccacctcggcctcccaaagtgctgggattacgggtgtgagccactgcacccggcccagattgccttcttcaggtaagtattttaaacctcttatgagctgtttccttccttcatcccttcgtttcctcctttttcctcccctcctaggactctctttctcttttcatttgcctctattttccttcattcttttcttcctttgttcattccttcctcccttctttcttccatctccctcttcttctttcttccatctccctcttcttctttcttccctctcttccttttttcctccttatttcttgctttccttctttatttcactcatctaaaaaaaacctgtagtatagatctttgaggaaattattttagttttgacattcattgcacagttgtctgtaacccagttagggaattctttcctatttttaaaatgaaaatagctgagagatttgtgaggaaaatttgaaacaatgttgattctgaatgtttttaaaaatttctaatatttatgaaacaactgtatctcagatgagcttcaatttgcaaggcatcattccattttcatttttaattctctgttccaatgcctctgctaagaaataagcattttctcataggaagagattattccttttaactttttttcaattttaatttttattcagcctcttacctttttgctaaaaccaaaagttcaaaagaaaggtgatcaggacactcccaggaattttttagccatgtgagaatatatggtgaaatgattcaagtagatgcaacatggtctactggaaaagcactgagattttgaggagaaaacttagctctgccattagttaattgtcatcaaggtcttcctatgaaaattgtagttcaattttcaaacatttattgtttttctccaaagtgctaggcatatgcttttgtgctggagatgaaagatgaataacatgtaggtgctgtttttgaagaacatcactgaagagagagtgagctaaaacaaataatgatttgtgtgctagaatagagccaggttgtacagaaaggttctattaatagcgctcagtgatccctgcaaaagaagcatttgattctgtccaaagagatgagtacagaaaaagccaaagagaagaaatgatatttgatttgggattttgaaggatgaataggatttaaccagatgaatacattggaggaaagatattctggtaggaacactgtgagtaaacaactgtaggactttgggagggattgtgagtagagtgtgcaagatggaaagtacgttggcattataatgattcatcatcaacaacaccatgtttgcttgcctggttgaatgtccctgagtacaccagctgacatggatgccagaattccagctatgagaatttctcctctatttattttaaacgtaggtacaaatcagttctctttgaaccctgcctgactttgcatcatggtttcttctccttatctacttctttgtgaatgtgataactcaactttggaattgtaactttgtttctggcatcgcatccttcctaacatgctcattccaaaaactactctttcactgcactacttaggcaagaggcccccggccatgagtctcagagttctcctcctcatatcaccaaagtgtcccatgggttccagtggaaggtgagcaataacagtatctcctgcagccacctcacagaactgttgtgaaggatagagatgataacagatggaccatgtattcactttggaggtaaatagacttggatttaaatcctgagtctgactgagtaagccaagtcaagttatttaacttctatggtcctcgatattctcagtttcctatgatggggctaatagtacctacttggtagaattattgtgagaattttcattcaatgaatgtggactgaacacttgctatatgtgggctactattctagggcctggggatgtaaaagagaaacaagtccttgcctccttgaattcagactgtaaataaacaattaactacataatataatatcagaaagagtttggtggctggaagaatagcaaagggtaaggggagagagagagaggaacagagtgagagtagtgatattgcagagggtgttcaaggaaagcatcttacctgcatgaaataaagggataaaccatgtagaaatctggaagaagagtatttcaggcagatggaagagcatatacaaaacctctgttatggactaagttgtatccctctaaaaggcatgtgctgaagccctcacccacagtgtaactgtatttgaaaataaggcctctaaagaagtaattaaggttaaatgaggtcataagggtgggctctgatcccatggactgatgtccttttaagaagaggaagacatcagagctcactcactctgtgcacacacagaggaaaggccatgtgaggagacaggggaaggtggccgtctacacgtcaggaagggaggcctcaccagtaaccacccctgaaggcaccttggtcttggtcttctcacctccagaattgtgaggaaataaattcctgttgtttaagccatccagtctgtggtgttttgttatggcagcccgagctcactaataatacaggctctgaggctgaaatgtcccaggcatgtgactgcagcagagtcagtgatgggaggcagtgctgggaaatgccttggagaagtagccaggatccaggacacctttgccatgatgaggagtcaggacttgatgccaagggagatggctgtctttgaagcatgtgcttcaaggagtaaaatgacatgtgtttttaaaagatcaaactggctgctatgtggggaattgactctgggccagagaccatggtcttgagagcagttaggtagacaacaggagcccctagtggagttggtgagaagtggttgggatacattttggagatgaagctgactgaatttggtaatggattggatgacgaatggaaagaaacgagtcaggatgactcactggttattgggctgagcatccgagtgagtgatggtgtttttgtggagactgccactcttacgtctgtaatgctattctgcagacaccagtgtggctcactctctcccgtcttgcatgtctttcctaaatgtcaccttctgattcagaccttccctgggcagccttttaaaaattgcattgtttctctgtttccctgtcatgcctttcttttctctatagtatttatccccatctaacatattatatattttacttaccaattttattttcttctaaaatgtatatttcatgcatttttatctgttttgttcactgctttttagttcacatgtcttgaacgtggtctggtatacaacaggtgatccatatttcttgaatataaggatggatgaatgaatgaatgaatgggtgaaacctggggaagaggaatcaagaactttgttaaaatgagtactagttggccgggcatggtggctcacatctgtaatcctagcactttgggaagccgaggtgggcagatcaaggtcaggagttcaagacaagcctgaccaacatggaggaacaccgtctctactaaaaatacaaaattagctgggcgtggtggcacacacctgtaatcccagctacttgggaggctgagggatgagaatggcttgaacctgggaggtggaggttgcgatgagccgagattgtgccattgcactccagcctgggcaacaggggagaaactccatcacaaaaaaaaaaaaaaaatactggtcaattggaagtatctggaaggtaattgctataccattaaatgagatatatataacaattattattacaagtattcttcctcttttttttttttttttttttttttggagacggagtctcgctctgtcacccaggctagagtgcagtcttgcaatctcggctcactgcaagctccgcctcctgggttcacgccattctcctgcctcagcctcccgagtagctgggactaccggcacccgccaccacgcccggctaattttttgtatttttagtagagacagggtttcaccatgttaagtattcttcctcttctaagtgtgctgcacccacctcttagtagactttggttgggattatctgagagtagtcttttttagttctgtggctgtgtgagcacatggttgggagaatgtgaggaggatgtggccatgaccaactttatccttttgtagccactcactccccagcgtcacacaaatggatgcttacgcagatttcctatatcctccataggctcctatctttgtgctgagtattaattcccatctgtgttcaaggacggtaatcaggcaggggcagtaatcaaaatgatgtgtacagcaaaatcaaagctttcgcatcataatcaaaaccatgcagtaaattataggaatacgtgttctggtttaatcaatgactgatcttgcttggatgcttgatacagagaaaatcaaagatttggtttcaaattagccaaggggaacatattatgaatgatctcatataacttagcatgctatcacagtgattattttttaaataataagattttgctgtaggtctcaccacactactattttagcatacaacgactaagaaaaattctttagtatttgtccttacatagtgtcttgaagaatgacctgccctccaaaagcttgttacaggagagatgatataggcatgagcaaaaaatggtgaatgtgcttgtacccagcagtgttaagtaaattccgatctttgctgtgaattgcgagtgaaaagtttggggtgagtattttatttttcattgagaagtgaaataattgttagtttgtttagtagcactggtttttgggaattttttttcttttttgtctttacacattgcagagtagcagtaaagaaataggttggtcttttaaagggtgtatttcctgcttttaataaacacaagttttatgagaaaaataaataaatttcaatataaaattaagatgtacagaatatagatttagcacatataaaaaaggaaacaaaaatcattttaccttcactttagcctgggctgatttaacaaaacaccataaactgggtagatttttaacatcagaaattaatttctcatagttctagaggctgagaagtccaagatcaaggtgctggcagatttggtgtctggtgagagcccactacctcacagatagccttcttctcactgtaactcacatgggagaagtggccagagagctccctgggacctcttttataagggcactaatgccattcaggagggagggcatcaccctcaggacctcatgacttccccaaggctccatgtctgaacatcatcaccttgggggttaggatttcaacatatgaattttggattgggacataaagagtctactgcaaatttcttcatgtcagtcacattttaaccaaaatcatcttacatggacttctctagaggtagttatattttttaaccaactgcacttttatatgataacatatttttatatgccacctgcaaaagggctacctaatgaggccacctattttttgtaagtgtaagagactcagctggaagcaagttcaagtgtgaagcactgtcccctctctacctgggacatggtgcatacaaatgggagtaacatgagctttgcaggggtcatcttggcctcctgtcccacctccaccacttaccagtcatcattcattattgttattccatgaacaatgccacccacaaacccagagtgactctcagttcattgcttgtcttcacccagcgtaatgccagttgtgtgtccttaacatctttctcatctccttattttgtcctcacttctctccccactgccaatgtttaggcctgcagcaacgatttcctaaattgcccaccttccatccagcttccatcacactgctagagtaacacttcagaaaatccaagttcaatcctattaaaatcttattttaatcagtcgtctatttaattatttttattattgcccattactaggatagagaattccaagtttgtcaagtaatgaactgcatgatattcctggtctctttattcaaagtcatctcctacttatacccctaatgtgtgcgcgcacacacacacacacacacacacacacacacacgtacacaccatcttgccttccaggcaccctcagccacctttactactcctggcatgctgtctcctgcacaagtctcattgcctttaccctctgtggaatttccctctctgtgctcttaccagatcactttataaagttatttttaaatatgcttgtgaaaataaatgaagatcacatgaacaagaacagaggtgatttatttagagtttgcaagagaatcaaccactatcagttgcatttggcacagacttaaaggaacacagaaagataggaaacctttagagtgaaacaaagagcaggttccaggtacgctgtggcatgaggaagctggagttgagctaactagatgtgaacatctgatgtggttggtttgggaagcagatcttgcttcctccggttgattctgagttgaaaggagggagccaagaatagggaagctggcagtcattgactgtatcgtgactgttggggccagttgctgtagaggttgtggtttggcttccagctggttgctgcagaggtggtgctcagaattctgttgtcatatattgtctggccattgtccgtttgtatatttcatctctcatgatcaatcaatattttttgaatgagtacatgaatatttcatctcagtaagtgatcattccctcctcatccatcttaatcataaaattctaatgtcctaggttctttatctttcaacaaattatgtttccctttcttaatgggtagaaaaaggaagcttccccataggcctaaatgtgctgatttcaagagaaagcatacttctttgcaacaagaaattgcccaggccttcactcttaaccactatgctacatcaacgtccttagatgaaacagagacttgggggcatatatttcccaatttttcaaaatccatttttatcgcatattcaatttggcctgcttaccttatttacattacctgtctgggatgaaagacatttgaggttgtcattctggactcttaagtaagttcttcctttaaagtaaagaagctgaccttccaagctaatttatcccacttaacaagagtaataataacacaccacccactccagaaaggaaatcatgcagatgaatgaaataatgtttgtacagagcttgacactccataaaatactctaataacatggtgtctacactttgaaatgttcaaatcctatttcaatagaattaaaagccatgaagaataaaatgtgaattgcttgtcagacttttacatagaggtgcagggtgatactgatgccattagacaatttaaaagctgggttttagcaaagtttctgaggaatctgattggtttgtgggggagaaagtgatggtggtacttattcatatccatttttgtagaaaaacaataggttataacatgaaccgagaaacacttacgcagctaaatttacagaaatctgtctactcatctccgaggaaaagttttggctaagcaagttaattttgtcgttagacatttgcatagtaattgtattgagtctgaatgtgcatctgcatggaaagcatgttttttcaatcctgttctttggacatggattaatatagatcctggcgagtccttaaataataaattattgaagttgaatgcttaattactttacatttagatcttttataaccagatgcttgaacccctagtctgccatgtattgctgctgcctttattggtgttaccaggtaatagtcacctgagtttttcacatggtcttggtttgagggtagtctactaaagaatgcccacatatagtgtttcaaatattattaaagagtgataattaaatgtgcctgatgtataaaaagcatgtgaggtcatttaaactaacacttttattgtgattgttgtgaaggttatgaaaaacttgatcatgtatattatctaaagggattgttacaaacctcaagtgacttcaggtcattgaaaccattgcatgtggtgaccagctacagaggccatgacatttttcccttgcctattgtatccaaggttattttgcaaatcaccgctttgcatggtacaaccttcggagtttctagaaattgcctggagtgataaaccagagtatattcaacaataggatttcctagaattagtgggagaggtgtaattaagttactgtgtaatatatttcccccaaatgataaatatcaatatgtgaacactgaatatgtgctcctatgaagccaccttaagtggcagtttttagctcagaaattgtgaaccaatgttttgtccacctgaaccagtttgggtggatggaaaagacttaagggcagatttcagaacttgtttttctttgttaattcaaaaatgattctactaaactctagatgagatcaagtggtgatagagatatcagctgagtgagttctgttttctggaactttcttgaatctttattagtaattcatagcatttttctagatttcatggctgcagtttcatattgacatcatccagtatcactctaaagggactctaaaactacccttcctggcattcatctaagagctgggaagccatccgcttatacctggcttagaatatcatttttagagacatgaccacaagcctgctgacattcaagagcatggcttaagtgcatcccactcagagctttgtgaattcttcttgtaaattatgatgcctattcaagatttagtgggaatactccctcttctcaagcatttatcaaaacacaaggtgaatgcattatccacattaactgctgttcaaaaattctgtccaaaagttttgtttcaatataggcaaagtttctgtgtgatgcctggcatatggccaaccatataggatggccatgatctttattactgatttcttagtgtttattttgaatgtaaagttctttatgtttttcctaaaagttcctcactgtttccctcactcacccactagcccacatattcacatattttacttggttgtgactatttgaagaaagcccttaaagcttttttctaaagccccccatttaagattttcaagtacataggaaccactggggactcttactaccattctgattctgtaggctggggcctgagggtcttcattgctaactagctcctaggtgataggaacagtgctgagagcacactttgagtggcaagtctccaaagcagtgctgtctaatagaactttctgtgatgatggaaatgcttcatatctgtgccatccaaatgagtggccacttgcccgatgtggttaatgagtatttgaaatgtggccagtgcaactcaggaactaaaatttaattttatttagtttaattaatctaaatttaaatagatacctaccttatttgactatgctaggggacttaattaaagtctttatagctccttggctttccccagtcttgagaaaaagaatctgaaagtcgagggctctttcttatctccaattttccagaatcttgcatagggccaagaatattatgtatgcatagtaaatgacattcctattaagaggtctagtctgcagttttgggggcagactcatagaactgtcaaataataaaaagatttgactttgaagctataagacatggtgggtaggtggctcagcctctaccacttacaggataatttctgacaagtcacttaatccctctaagcatcaatttcctcatctcaaaatagcaatcatgattatggtaatgtaatacctatctcacagagttgctgtgttatgcacataaaattcctggcaaattatttttttcaagtgatacttgctctgcaaatgctagtttttgtggttatttcagcatgaatttcttttttcccctaattagttatatttcagtaaaacaatagaggaaggtaccctgtgtggacatagttgcaatccaattgagaggttaaataataacacaaaactacatgcagttttgtatcatttctcatgtggagaaagtagtttcgacggtcaaggaggagggcttcagcatgttactttgattctttgcattttatattattttatgtggaagcaaacaatatttttggcctgggattttgtgttgtttgatttaattccctcataaaaatgtgtcataaatgctttgctaattgtgattgaaatttcataactctatctcatcttaaaaatatcccattccaatttgctgaatacataatttccccttgtttaaagttatataatggacatattttctctttgtttttcttgagtatatttgctttgaaatagcttttttgtttttcataccctctgtttatatatatgtatatatgtaaatatatgtgtatatatataaacgtatatatgtatttacacacacacatatgtatacacacatatattaatcaaaagcattgcctacttcaagaaaataagaaaaatcacaaggggtaacatttcgcaagtgtgcaaagcactattctaaacaccttacatatataaacacgttgagttgtcactgaggctgagtaaacctttaagctcttttactgtctgctgtggtgttgagttctgaaaatattgatagtcctcttatcactggtaatgacatgacgtgccatccaatgacctttgtacaatcatgatttatgtataggttgaactaggggcatcgccatttaagaacgattaagacaaatcaaggcatttctgaaagagaacagattgattttgtttcttaaagtatttatagcttgtaaggcagctgtctgcttttgtatattcttaaacaagcatcatagaccttattcaataatttaagtgttttctttagaactgttttgcagcaaaccgaacttcccatttgcattgatcagtgttttcaccttcattctagattacattttaaagtaaaccaaccaatttggataaatgtaaacgcaatcacttgttaacaatcttctgagactgaatcggtgctgggtatttctgagtttctatggaaggaaaatagttcaaagttcagattggctgtctcaccacctaagctccatgccttgccccttgctttcctccacaataaggcttagacgcaaaacacttcgttttcctgatcaccactcaggcatgagagaccaggtgatctatggctggccaataggccaacaacaagtagggagaacctcctttcatgagtagaaaggcaaagcattgtgaagggagcacctttctatattattccaacctcgaataaatgagaatttatttatttattttattccagtttgttcatttatttcttatacgctctaagaggcaactcagtatgttgattatttttttcagattcatgcccattcatcttcttaaagtagagtttctacagatgctccaggatcagtctgacctagtacagagcagtgtgtgtgtgtgtgtgtgtgtgtgtgtgtgtgtgtgtgtctgtgtatgtgtgtgtgctcctgcatgcttttaattatatattgaagatatgctaaaatatttataatgcctctcaaagattcaaagaataataataaaataagcagctttccctaccttagagaccttctgtgtacccttcccttatcccttcattttcttccctaccaacataaccactgatctgaattttgcatttacttttctcattcttctcttacagtcatactacataccaggcagctctaaagatatattgtttaattttacatgttttggacttctttaaaaaaagaatcatactgaacaaaaatggaatcatattgcatgtattcttatgaaacttcatttttcatccaataatgctacttgaaatgtatttatgttgatgtagttactacagccatttttcactgctctatatttgtctcacttttgccaggtttaatttttttctattttatcctttgaactagcttgaaattatatacttcactcttttttctaatctcttggttactccagaaattttggcttgtatacgtaactttaatcaaaatctttatgattctcttgaatgataaaatatgttcagcattttagcttcagctatttagtctggtatttaattacaccttcctaaaccacacacattagacatttttactacaatcaatgcttatagaaattcactcacatatttatcagcattttttttatttacctctccttcatgcatctctgactttgcatttgggattattttccttctgactgtagttggttctgtaggaaatcctcccgggagtattgttaaatattttccatttgtttgaatgaaaaatggccttttgaaatcttttgtattaaaagttggatgcactgggttttcagttcccggttgacagttgtttcttcttggcacattggcagcagtttctcctatagtctaatattcactgttgctgttgacaagtcatggcaattgttattcctctgaagtaatctcttcctctggttgcttttaatattttcatgttgtattgggtgttctgaaatttcactaagtctccaggtatatgtctttctaagtttcctcctcaggatttgttgtgcttcctaaatctgaggtttgaggtaatcagttctctagcatttatagcccattgctactttgcctccctcccattcattctgttttccttttctcaatagacttttccactctgtcgtgccctccaacaactttcttatgattccaacctagctgtctcactgtgctgccttctaaatcactttttcataactatcttctaggtcaataatttttccttcagctgtgtctaatctgctgataaaacatctgtaaggaacatgactgtgctgcacccaagcaggcataggccaaggtaaacaacctggatgactcagcaggtttgtggtacaagtgcatagtcccatgtcttatataatcatagctgtgtagagataacatagaaaagttcaccgccatagccataacatagagaagctcaccacctagctctcagccactattgtttgtgtaatgtataaaagtaacactgaccctgtgaggcagctgctgaataaagccatgtctcatctacctgctgtttctcaagtgttcttccagctccctgccccacatccacccactcccctcagccctcagctggggttggaacttgaccccaagcatgacaacatccattggtttttaattttaattaccatatttttaattcctagatattctttttgctttattttaaaattgatttggtcattttttaatagttacttcttccttaatcatattatcatcttcttatttatttcctgaaatgtgttagacattcttagataattcctatatctattagaattatgggttgaagttgtttgttatttgtgctcttcttattcatgttgacttgttattttatatattatatattttcatggaactttcttttaagtgttgtctgagacctgggttcacgtcaaggatgatttttgtttgcttcaagtagctgtccacagaggtagaggtgggaaatcaaccagtggccaataaattcattccccaactccctacaaaagtagtatgatgcaagccataaactcaaataccgaccaggttgtgggtatgaaatctctttggagattttttttttccttcacttagtgctcaattcatcaggcaatttcccttcttgttttctgaaagaatttattgccagttacagcttatgctgctgttccaattgtataagggatctctagtgagactccccacattgcaaagtccttagactttttctctgattgctccaactcacacatttgaaatcatacaaatggaagctcatggttgccaagactcagcagatatcttcagggtgaaacctggagtcagtgttaatgtctcttcagagtctttagtttgttttcatccttttccagcagaagagccctacaaaagaagacatttatgcagccaaaaaacacatgaaaaaatgctcaccatcactggccatcagagaaatgcaaatcaaaaccacaatgagataccatctcacaccagttagaatggcaatcattaaaaagtcaggaaacaacaggtgctggagaggatgtggagaaacaggaacacttttacactgttggtgggactgtaaactagttcaaccgttgtggaagtcagtgtggcgattcctcagggatctagaactagaaataccatttgacccagccatcccattactgggtatatacccaaaggactataaatcatgctgctataaagacacatgcacacgtatgtttattgcggcattattcacaatagcaaagacttggaaccaacccaaatgtccaacaatgatagactggattaagaaaatgtggcacatatacaccatggaatactatgcagccataaaaaatgatgagttcatgtcctttgtggggacatggatgcaattggaaatcatcattctcagtaaactatcacaagaacaaaaaaccaaacaccacatattctcgctcataggtgggaattgaacaatgagaacacatggacacaggaaggggaatatcacactctggggactgttgtggggtgggggaggggggagggatagcattgggagatatacctaatgctagatgacgagttagtgggtgcagcgcaccagcatggcacatgtatacatatgtaactaacctgcacattgtgcacatgtaccctaaaacttaaagtgtaataataattaaaaaaaaacaaaagagctgtacagggaatctaggctggcatagtgtgagaaacaaaacacacatggcagctctttttgccatccacaacaaaatactaacaattgagcctataatcagctaaatccaaaggcaacataatgttcttccccatcttttacttgtgcagttgtgttttggatccagattaaagaccttaaatttagtactattaagtttattgtttgtaggtttgactgagctccgtaaaattttttggatcttaattctatcacttaacagtcacaattttccccaatttcatgtcatgcatacatttggccatcacaacttgaatgtttttactacactgttgtaaaaatgttgacccagatcagattaaagcctcaatatcccctctaggtagagactcgtgtatgatgtggcattgactaggtctgctgttaggaatactttctctttcttttcttttgttttatttttgagatctccctctgtcaccaaggctggaatgcagtggtgcaatctcagctcactgtaacttctgcctccttgattcaagcgattctcatgactcagcctcccaagtagctgggattataggcatgtgccaccatgcccaactaattttttgtatttttagtagagatggggtttcactatgttggccaggctggtctcaaactcctggcctcaagtgatctgcctgtcttggcctcacaaagtgctgggattacaggcatgagccaccatgcctgtccatatttctttatcttcaagaacatattttgccaaatgccttcctgaagtcaacacacattgtatttatgatttttttagccagagaagaattaaatcagttaacatgaatttgacttataaatccacctgtgtgttaatcaaagggctccatggatagccacacccagtcatcatttatcatctccatttattcctcactggggtcatttgaagattctgactcagaattacatccttgataccttgctaacagtcaagttaagctattatggaattgtgcctattttcatgaatatttgggcagcctcttttcctaaagcttataataaaggcctctatgaactaccatgaactccatggacagtaggtatacagtgttatatttgagttccttcccttttcaccagatgtccaggtaatctgtactttatttctataatgacatagcatccatccttttctccttttatcttttgagcattttccagggtgctttcatcatcttggttttggatttttatcagaacatgtgtccttgaacttgcacacaagaaagactttcagtgattgacacatccaaggcttcttatttagttgttcttcaactcaaccacattgtctaatagaaaccagccaggctctgctgtctgcaccattaggatgattatgaaaagaatttaactagcattttcctatttatctttcaaatatataagcttctacttagcaatatgaaataacaaaccactgctacaggaaaaatgtggataaatctcacagagattgtgtggaacaaataaaacaaatgaagtcatgtgcaaaagactacttactctgttgttctgtttataggaaattcaagaacaagcaaaactaataaatggtcctgtaagtcagaatagagttttcccctgggactgggaaatattgactggaagaagcgtgagggagccttatagaggctctatatgttctatattttgatctaggtagtagttataagtctgtttacatatataaatattcataaagttgtacatttaatacgtgtgcattttactatatgtatgttataccttaataaagaagaaaaactcatttaggttacaagtgagaatcagttttagtgcagtacttatatgagtatggactctggagtcttggatatataatcagttgattacaatcaacatctgaatgattttggaaactaagtttcctcatctgtaaaatggatgattttctgtgataactgtacatttttactttttgtataaggcataatggagtgatgtgtgtaagtcacttaccatcatacctgccacaatacatgcaagttttagtataatatcgtcctgattcaaaacatttcctgctttttaaaacatcctgctgtttagacagatgactgacattattcaatacatcaaatggtatgttttcattagttatctatttgtgacttgcttagtaattataatggcaactgccatttatgtaactctttatgtttaaaagctaatttatatacattatctaatttaattattcacaacagtgctataaaaatgatattaattttatcctcatcttgccaacctagagcctgagatgcagagacctgaagtaacttacccaaatgacatagtcaggaaatattagagagagtcataactcagtcatttatctttccctcttcaaacggaagggtacattagagtcacctacagagctagttacaagttccaccccccgtagtgtctgattcagcaggtttgaggtgggtcctgagattgctgcatttcccaggcgatgctgacactaccgtcctatggaccacactttgagtagcaaagctttgcagatgaagaaagcgtaagcatcagacctgagttctgccttcaaagagcttgcatttcttttttcaggaaacaggactgaagtatgaaataatagaagcctccctaaggtggtttatatcctgagaacaccctctttgctggaaagaaagtttcatagtagaagagaacttaagaatactcagattatatataggagaacaaagtatgcttagatacgctaattttaatggtgttcaatgacttatatgccaaaatgttaaaatggtgggaggcccctaaattaatatcctaattcaagtatcctagtcgtgttattctcacaaattgtcatttcattatgtcaagtaatattttagggtgttttaaccatcgttatttaggtctttgattgatgtgaaaattagtctcagtgctgtaaccacaggtttttgtcagtgtaaccctactgagttccagcttcttttttaaaaaaaagtacatatgtgtacccacaaccgttgttactaattgaaatacttgaagaaaagagagaaaacagtgaccaaaattcttataaaaatcaaaagctttccattttttccagctttgctttgtttcacagcagccatttatcagagttttaacaagtaacaagtaaccagtcacctattttttaagtgacagcattattaagatataattcacacaccatacaattcactcatataaagtgtacaattctgtaggtttcagcgtattcgtagagttatgcaaccatcactacaatgtaattttagaacattttgttacttccaaaagaaaccctgtccccattaatagtcattcctcatttctcaattcactctgccctttgcaaccgctaatttactttctgtctccatggatttgtctcttccagacatttcatagaaatggaatcacaaaatatgtggtcttttgtgaccagcttctttcatatagcctagcgtttttgagatccatccgtgtaaaatggatcagttttttattccattttatggtcaaataatattcaattgaatgaatatgccacattttatctacccattcatcagttgatggacatttcagccacttccacactttggctgtatgagtaagaacacatttatgtacaagcttttgtgaggacatatgttttcatgtatctttggtatatacccaggagtagaattcctgggacatatggaaactatgtttaaaccataaggaactgacagttttcctaaagagttgaatcattttacaattccactagcagtgtatgatgattccacgttctccacattctcaccagctcttgctaatatttatctttttgtttacagtagtgggtgtgaaatggtatcttgttgtggttttgatgtgcatttccctaatcctagtgatgctgagcttcttgcatgtgcatttgcttactttgttttctttttccatcctttgagacaaggtctcactcttagtccaggctggagtgcagtggtgcgatcacagctcactgcagccttgacttcccaagatcaagtgatcctcccacctcagcctcccaagtagctgggactacaaagcacaaactctttagttttttagaaatggggtctcgccatattgcccagactggtcattcatttatctcttttggagaaatgtgtattcagattatttgcccattttttaatttttttttctttttaaaatttaattgtaaaatttgaataacttttttgtgctcttctttgttttggtcttgttttgtttgatttggtcttgttttgttccttaaccttttggtgactagtgagtagctattggtagaaagtgggtaattactaaacaaattgcaatgagaaaaaaaagaattaaatagtgtggaacacttgcaaatatgataactaagttttaccaattatgaacaggttaatatttggtttactgtttggaaaataataatgtacaatttacacattggttctaatacagtatttaatctgtatctttgtgtcatatttaataccaccattttccaaattgttccatggaatgtaataggttttatatcaaaaaggggtctgtggcttaataagtctggagaaccataggctcaataaacgggatggagtgttttaactcaagggcttccttgaacctttaatatgtaaatagacattgtaagtgttcaaagcaaggactgtacatgaaaataaaaccctttactttccctaatcatttcttttgggacttgtgttctgtggaacacactcggggaagcattgctttaaggatgttaatttttcttaaagaaagtatattgccctggagagctcagattgtgacaactggacaggtacaaagactggatgaaacagcagcaattgttaagttacgtgttacaaactcagaattaatatgggaaggatcctgacattttatgaaattaaaactaatattaattgaacagaaatagaaaaaaacctgggaagacttgagacagtttgtgattcctctcagctagctggcatgtttattttgtattacagtgcataattgaccccctgctaggtgaattggattttgcagactcgccttgttatgtatttcaaagagctctaaatttaatacatgctgctcctcagggttcaagctttgaatcaccctccttttcctgtgttttagctgggtaagtttctctcttttcaagaacagcaactttttcaatgcagacagtttaattataaagatcttctcatttcggtaatgttttagtgaatctcatatttcctcataaatttagggagaatgcagctatttctaaaaataggaattaatagttgagttgttactggcttttttattgtcctttccagaattacaaaaaaaatagtctttggcagttcacattgcttcaggttgaaagtatgcaaaatttttaaactattccatattcgtaataagtgaaaaaataattatttttgatttctcccctaaggtactagcaatgtgtccattaggaaatttagctcttatttttggtgaagtagcagaatttttgtttcaaggcaaattcagcatagatacttgattgtaaagatattattgtttgcaaatctttgtggagttttttgggggccaaattgaagcattaactcaaaagaatggcccttttcttttattgttatgttcttttcattttatttatttgctttcatacattttctaattaattttatgtttttaccaataccagccccatcactggggttctggtgaccacttaattttactgtgaagtagaagccagatgatggataagtcaagccccaatataataaagccaccttaactagttaaactgatattatagagcttagctctgactccagatatacatatataccattactttatagaacaactctctctggaatagccgtgttctctttaagccaggtatgatggtgcatgcctgtagtccagctactggggaggctgaggtgggaggattacttgagcctaggagttcaaggccaacctgggcaacactgcaaaactttgtctcaaaaaaaaaaaagttatcttcgtcattgagatgttgcattgatcacccaagtatggtgaagaattgaagagtagccaattagagtgctcgattatgaaaatatgatgcaagatagggaccaggaaggtcaccacagttcttcctggggctagttgctatgaaagataaacccccacatctcagtagcttaacactattgaagtttacattgttgtttacaaaatgctctttctggtggactgtttcccttcaagccatgattcacatggccggcattcttccatcttgtaaacccatcatctacaaacagagacatccaacttaccctgctaggctgcatcaagccagaaggagaaagagtatggacggtcaccagtggaaggtttctgtgaatgtgactctagctctaactctgtgagctagaagtcagtcatatcaccaaacctcatcccaagggacactggggcatgtaatccaaccacatatgctcaagaagatgaaatggattttggtgaacatgcagtgatcttgacatacactgctgaatatttgcttttttatatttacagtgttgaaattaatctgactaatgaattggagttagttatctccaaaggaaaaaaaaattacacatgcacgcacacattaattatacattagtcttaggctaataattaatatatccacatgttaagtaatttctttaataagttctcttcaaattagttcaaagatgtctttggcattcctagaaggcacattttattgatctgttctcaatttacaaaacaaataactgactctttatatctcctgaatctcctttgaacattaaactgagtagcaaagcatcacacatagcaagaaaattgattttgacaatccagccttgttagttatcatttcaacaggtgccattagtatcaagaccgaggtgcctgccacagctctagtgcaataatgtgaagtaaatatccatccaagcaccctggcctcttctccaaaatagaaaatgacatcatgtaattggttttgtctgaactgctcagtgagtgaaaatgtgtttcagaagagttaaggcatgatgtcattattcctgaagtggattcttgcaaaggctgggcactcagcagcctgagtcttaaaaccagcagcagtacaaaaacctgatgcagaaccttaaccccatttatataatatggtgaattttttctcaaatgggaatatggtgcattatctttaaaaacaagaagtgatcacatgctccagaacaccactgatgcctctaagaaatcttattgaattaagacagttaattaattgtctgcaatagtcttgactcttgcctgtctctcacttgagcatgtgttgtaaattaggcaggaatatcattagggcatccagttcgttcccatgccccagtggcaaagaggggcaggacatgaagatgattttatttatttaacaaatactgatcacctgctatgtgccttgtaatgatcttagtgctgggtatatagccatgaataaaatgagattcctctttttatacataataagcaaataaaaatacaacccaatggcaggtagagtttcatgctaggaagaaagataaagcaaaatgacatgctagagggtgatgcgggagtggcatggactggaagatgggctgtcagagtatgacatttgagcagaggctgaaatgctctgagggagaaaatcataaatcatgtggatatttgttggggaaatgattataggtgtagggaacagcaggggcaaagtccttggatcggagtgtgcttggcaagtttaaagatgagcaaacatgaatgaggggtagagtggcagggattatggtggaggagaggcagaaggagcagaacatgcaacatgctggatgctgctgtaggccctcataagggactgactattgagccataaagccactcgatttcaggcttggcattcatgctctagcaccagaagtgtaatgctgggtggtctatgggctctgcatttaggctggggactaagatgtgacatttctggaccttggatgattgtcaaaggatgggaggttggttctgggttcagagaatggggaagtacattgcccattaagaattttaagagatctaagtgtgaccacaattgatgattttattatcttcacttcagtgataaaattcttcaccctcctcattccataatattctgctgctttcacctgaagttcgccaggtatgattaaacattgagtaattcagaccaaagcttccagatatctagtaacaatatacactagtcaaaaaacaagatcacacacacagacacacacacacacacacacacagacacacacacacactctttagtatatttggcaaggagaaatcattgagtgcatgaatttataatgggattgtatattttcaatcaaagatcttacatgaaaaatgttcaatcattaagataagggagacatttatgttatgtggtacccaagatatgccagtaaggttttttaaaatacactttattcatttgttcaaaagccattttgggtggtggaggcttactctgtgctactgaagacataatgaagatcaggagataccctggcagccgagagcagtggtgcatgcctgtaatcccagctactcaggaggttgaggtggcaggattgcttgagcctgtgggttggagaccaacctgggcaacacagcaagaccctgtctcaaaaaaataagtgggaaaaaaagacagagatgtccttgcaacaaaccagaaagtgaggtataactattctaattttacaaacaaggtaactgaggcacagaggagttcagcctgtgttcggagtcacacagctggtaacatgaagttgaaacacaaatgtaacttttttctacaccttgtctttttaaaaccaacaacatctttcagacacttgcacactttttttcagataattggtgtatgtaaaggatttcacttcacatggactatttggtagatatataacatcttagatatagccaatatcttgtataggaacaatgtttgtatgaagtaaagaaaaacaataggataatcaatgcaaggtagaaagtgatagcacacttctgtgattaatactaggataactggtaaagagtatatgctattttgtattactatttccataacttccaatcatgcacatggctgcttctctacaactctacaaagacagtatctaacacactgtcatacaccactgcttcctatcttgttaaaatgccaattctgacgcaggtctggtgtgggacctgagattctgcatttctaacagactccagggatgcagatgtcattgctctgtgctcttaaatgtggagtttaaggctattacagtcatttccggcaccaaccaaaacactgtgtcttggcccccacggctactggtggtcacttttgcaagaatgtttcctgggagacctagtagagcagcttacaggagttcacaaagacacaaaatgatggtaggaaggaataaagaggagaagtaaaagtgttgcaatggattctgtacctcaatcctgaagaaaccacagatcagtcacttccttcttgttcaagtgtgtcaagtgtgtcaagtgtgtcagcctgatttggcacagctgacttgatgaagcatgatctcacacagcaaagctgttgatcaccttgaagaatatgtactttgctccttggtgtaacctaaattttacctcgctaaaacaaaacaaaaagaatctaatattctactcatattattcattctggctggatgctaaagttaatttccttaagtgcttcagatactatattaaaactatccttttatcaaatattttaatataaagcttttgaaaacatgcaagagaatttcttcattagagccttctccaattttaatgagcacacaaatcaccttaaaatcttattaaaaatataaattttgactcagtgagtctgggatagggattgaaattttccttttcttaaaagatcttagagaaggtggatacagcatccttggagcactctgaatagacgggccttggaatatcttatcttcacttgtattaggatggcttttttgtgtgtgtgatgttcaaaatgatgaggaagctatatgtttacatatcaccagaagcttaaaatgatggaaaggaggctcccaccccatcatataggccattgatcaaagattctgcagtcacactatttccttaccatgatggattattcaaacaccagctgtaggaaaaggatttttttcaggaaactgatggtccattgtagtttttctgaaatcaggctgtacttgaggattactcagcgggttccaaagagtacagacatttaagatccaccccagaccaactaaatcagaatctctgggcatgaatctaatgagtagtctctagaccagcagcacctgcaagcttatgagccatacagaatcgcaggcccctccagatctactgaagtacagcttgaaaagatccccaagcaattccaacgcatgttcaattttgagagatgctgctaactgggaggcaaagctgtagagttgccgcagcaacttaattgtaaggtattaaaagtctcctttcctatctaatcgtttggatgtctgccaggtattaggaccaaaggaagacgggcagacataagaacccatccaatggtggttacattgattatatccttcctgaggcatctgaaatagtataaaataataaggagagaacaccaaaaatgtatcaacttccatgtaactagtgtgtattagcccatttttgctttgttgtaaaagaatatctgaaatttagaaatttagtaatttagaaagaaaagaggtttatttagttcgtggttctgcaggctgtacaagcttggcaccagcatctggtgaagcctcaggaagctttcactcatggcagaaggcgaatagggagcaggtgtgtcacatagcaagagaggaagcaaaggagtggggaggatgtgccaggctcatttaaagaaccagctctcgcatgaactaattgtgcaagaactcactcatcaccagggcgatggcgccaagacagtcatgaaagatttgcacccataatccaagcagctcccactaggccccatctccaatactgggaataacatttcggcttaacgtttggatgggacacacatccaaaccacatcttagtgctttacatagactgttccatctatctctcctctttgtcatgggttttggttgactttctcccagaaagtcctccctgcttgtttctggctttaaatctattgagtaaaatttatctgaaggaaatttaatcaataattcaaaacaggaacagattattcatagggagagctgtgctcacagttttgttaatttgcagtggtagcattctttatcactggctgaaactcaagtaaaggagtgaaagatcaagtatttgttgagaaactattttgtgcctagcatcatgctaaggattatggtgacaaccgcaaaaggttagtttcatggcacttgttggagatgcatgtatttaacttgcaaatagtatacacaactcgtgtgttattaagttatgaaatattgaaaaagcataacatgggagtttaataatggaacacagacagactgagcagaaaaaaaaaattagtgaagggaggtgtcattttgaatttaggcttcacagagccaacagaacttgagtagatttaagatgtggacattccattgagagaaaacagcttcaacaaaagcaaaatatataaatatacatatataaataacacacagatgacaggaaacaaataataatgagagcttacccttaaacatgcagcactattttatgttttgcatttttaattttgggcatagaatttcatgtatgttggggaaactgtagaaattcttcttattctaattaaggaaggtagctttgaaaacaagcatattttaaatagttaaaattttcattattttttcctcaaaattatagattgtggtgcttttttgtaatttttgctaacttcaaaatgtaaagttaaaggttttatgaaatatcaattctgaaaaaaattttctgctactaatgatctaaaaactgctatgttaagcaggctcttttcatagattaaaaatgctcaaaattactttgatgtaaacttcattcattatacatgtaaaaagcttggtttacatggcttataagtcagttttacagtctggctgttaagcctaattctttagataattactatgtgaaattttcgttgtcattaattcttcattgtggcaaactggcatgagtattctctattatggagtaataatattaataagaagtgcacatattcaaaataatgtagaattatatgcactataatttacatatttgtttaatgtcttattttttattatcaactttgcttgtttatttgttttatgtcacctgctgtagaatgctaattggtaacaaattatagcattatagaataggtgcaagccatcaaagtgtacatttttatgtaaatattttatttttattatagaatgagtaacctaaagataaatgcagtgcattctcagcaataagataatgctgaaatacatttcagaagatacaatatttttaaacctgacaggaaattataaaacattagcttacatgaaataagtttcattctatatgagctttaatactgcaagatctatgtctattaactgacaatggaaagttttgtgaggaaaatggttgtatgctatatctttgcttccactaacaggaaacattacagagtcacaattcttaatagaccgcaggctcctttacaacttagccatctatattactcacttttatgtccctagcattggtgatagatggtgttatttattcacaattcttttgctttccatctttgccatgagtgtaagtggagttgacaatctactgcattgacttggccctgtgacttgctttagctagtcaaatgttagtggatgtaatgactttacatgtgcttgtgtggtatgactccttctcttgcatttctgccctttactatgagaaaaatatcttttaggtagttgacgatttcgaaatgaaaaggatatgaagatcagaacccaacctgtagcataacacaaatctatatgcacaaagcacgttccatgcagtcatgtcttagttctgggatttctaggtatgggatttccttgagctgagcactacatgtaatagtgatggtgaactatctaggtatcggtttctaaaggttttctcagtagtgggacagtagctgagaaataaaggagaaattggctaggccaggagacttctccatctctagggtcgccaggtaatagttcagattacttcagagatttaaaggtgcagcattagaacatggttttccaggttagcagggtcaggcagttaccagaagattctgcaagcatgacttggtgcctgagtgggtggcgagccaggggtccctgtccaatccccaagctgaacagagaataaaatccggattatgattaagctcatatccaccaccacaaaatggagagaaaaacaacagatttggttaacacccagtgttcaaggaatgagaaaagggataggaagcaaacttgaagcattgaaaaaatatgtcaggtcctgaaactggggggaggagaagtgggaaggagatgttctgaagagcgtcactgagaaaggcatatttatacctgaataagttctctccaatctgcctgcaatttttagctagtttgcctagtgtagccagattacagcctttgggtgtgttctgtgtcaccaatgaggagggctctgtaactgttgatgattgccatagaagggtgggtttcctgtcaagtcctccaggtactatccagatgctcccccaggatctgacagaggctggactaagggagccttctgaagaatagagtagcacacagcttgagaactgcagtgtggactgaacttgaagctcagctacatggtgttataagcagacttacaaaactacctctcagtttgggcaactgaaactgaaagtttactattgaatatagacaaattttggccaggcgctgtggctcatgcccagcactttgggaggctgaggcgggctgatcacctgagctcaggagttggagacaagcctggccaatatggcgaaacctggtctttaccaaaaatacaaaaattagctgggcgtggtggtgcgtacctgtagtcccacgtactggggaggctggggccagagaataagttgaatcggggaggcaaaggttgcagtgagccaagagcgcaccactgcactccagcttggagtagacagagcaagacttaatccccctaccccccaccctcccaaaaaagaaaaagaaacatgtaaaatacattttcatttaaaaagttaaattgtagtatattcacttttagtaataaattttttataatatgtcattaccaggcagacaaaaaaaacttcagatattttctttcaaagtgccttgagtgccttctgatagaactgctaacgagcaaaactagtactagttaaatagcactaatttgataatactaattattgtgaattgtttggatgacttctgatacatatattttactttgaaggggctttttctaggaatattgatatttaatacctgttatatcttctatttgtaaatgattattaagttggctacttgctctgcagagtattaggaatttcagtttttactggttggtggttgcatgtagttttgccaaacagaatgcttaataaacattttaagcttgttctgccttggctgtatattttagttcattttttgtaaattttctcaaaattaattgtaggctagcttacctataatagtccttaattaccattttgggggggaattcttttgtatagtaattgttctcccccaactagagtttatgtgccttctctgtccttctctgtccctcacctgaataatataatgctgaccatcatggagtaagcactgaacttataaatcatttgaattggttttttgatctgaaattcacagctgatgaaagcagttgaaagtcgatgttttctgtgagtcatgattttttttttccccaagctggagttgaaatctacttgaatatctctctcctatgacaaaggcaaaattaagtatcatgataactttcaggattcgaataaaataatcacttaatagtgatgtgaattttcatgaacattcgcagcttgaagaattattttagtatgccatgtatttatagtttaataaaacatatgtttctctatagttcaatttattttgtgcttgaaggaattttttttttttttttttttttttttttttgagagggagtctcgctctgtcgccaggctggagtgaagtggcgtgatctcggctcactgcaacctctgcctctcgggttcaagccattctcctacctcagcctcccaagtaactgagattacaggcacataccagcacgtccaactaatttttgtatttttagtagagacggggtttcaccacgttgggcaggatggtctagatctcttgatcttgtgatccactcacctcggcctcccaaagtggtgggattataggcgtgagccaccgtgcccagccagaaattatttttaaaactgtggttttgtattcccaggataaaatgtgtatcttttgtacagcttcacaaattagtatgtccctttacctatagcagtgcataaaaggatatttctttaaagatctatttgtataacattctacagtcccctctttattgaaagtactaatagcaatatttctaaaattatttaattttccagtgaatgccaaagagtcccaattatgggaaaatgtgttccattttggaaaatgctacatgcagttctcattttcactcagaaaaataaaaggcaatttaattacaaaggacgcaattttatagattggaaaaatatagaaatccagactgcttgccaagtggagtgagactgtgtgtaataaagtagattttgaaaacttatgctcaaaacacaatcaaaaagtcacagaatgtgagggtattatggatggcaaagagatatttggcaaatgtaagcagggcaggcagtccttcattttttttttttaacctctttttctaaatgccctctgctgaagtgggatagttatttaggggtaaggaaatgatggtgggaaaaaatgtgggagacatttttctctccacgtgcctgaaatcttgacattgttctctcgatcgatggaaataatcaaaaaggagaaggccatagccctggttaattaaccagctcactatttaagagcacaattctccaaaacagccatttatttctatctaataaacattaatctcaaataaataaaaacatattctctctctaattctattgtaagcaccttaagacaaaacctgagtcttctgttttgtcctaacaatggtgcaatgtgccctctagagaagacccttcctaagtgtgattggctgggatgggcttagctgttctacctttttctaaaggtggcactcccacataccttataaatgcaggtctagtttcatcattccattaatcacatgctgacatatcagcttcaattatttaaatcaaatatttacagttaacattagttatatgaagtcggtcctcagaaatcactgtatggaacacacttttatagttgacattgtttaacaatgtccttctaaatgttggccaagtaatttgcctgaagagcccttctctgcctgaagccataagtacttgaacagacagttttttggggagatcttcctagttaaaaatattgagctaatatctaaacttatagataacttcgggacatttgatttgagttaaggttagaacaatgctgcgtaattctggccacatatataattaatttaaattcttctagattaaaaaaaatgttgcagaatgctacagagctgcaaatgaagactagtatcctgttaaaaccatttgatctttaaactggcttgcttcatttcataatggatcgaagacaatggacacaaagtatataggcagtaaaataatgataaaataaatgttggtactctaaaatagaaataaattagaaaattaagaacaaggaaaacaaaacacaaatgcacacacatagcagctaagctggctcatacctcagggcctttggacctgttgttccctattcttggacccgttgcttccttagatctttggttttgttttactttttgagaaggaattttgctcttgttgcccaggctagaccataatggcacgatcttggctcaccacaacctcagcctcacgggttcaaacaattcttctgcctcagcctcccgagtagctgggatcataggcatgcgccaccatgcccagctaattttgtatttttagtagagacagggtttctccatgttggtcaggctggtctcgaactcccaacctcaagtgatctgcccaccttggcctcccaaagtgctgggattataggcatgagccactgcacccggccaccttctcagatcttttgctagctgctgctgcttcttcttctttttttttttttttaaatggagtctccctctgtcgtccaggctggaatgcagtggtgtgatcttggcttacagcaacctccacctcctgggttcaagtgttctcctgcctcagcctcccaagtagctgggactacaggcgccccctcaccatgcccagataattttttcatttttaatagagacagggtttcaccgtgttggtcaggctgttctcgaactcctgacctcaagtgatcctcccgaagtgctgggattacaggcatgagccaccggcctgctagcttcttctttcttgtcatgtgtctcttttgagatatcactcttccagagatgctctccttgaccaccttgtctgaactatccttatagtccccttgtgtcatctccttttgctttcttttcttcagatcatttatcaaaatcaagttgtttcttgttcacttccatgtgtaagtattgttgtctgtctaccccaattcaaatagaaactccaggagagtttgctcactgctatatcccccagttgtgcatgtgggtaccaggtgacactttctaagtagtttaaagtgagtacatgttcttaggaacttgctatgtggcctgaagctttctagaactcaaaatgaagagagagaaattagaaaggcagatgcttaccactgctccccagggaataataatttgaaaaccagcacttaattataatagacttgtattgccaggaaccccatccagtgggtactgagctggtacagtgagaaaactgtcaaacagaactttgtacaggagatactcttattgtggtccaaatctggagggttctattagatgaagttcatccaaacatagaacttagattaagggagtagatgtatactccacagccaatccttcacaaaactcatttgtctccattgggttttttataagctctggaaaacaaacaaacaaaagagatatttaataagttatctatttttttccagagtttcccttgttctcgtgctgatgattaactttaactcttcaaatcaattgtaagctgcctaaaggcagaaaagataatgtatttaaatatgtcttcttattcttaggacagaagaaggtccctatacatggcagatgttcattaaggatcagggtttagtgatgttaatgctattatataggttcattagtcatataaaagttcattatgtgccaggcactttcaaggcaagttctgagaaacaacattaatgactgggcacagaatctcagactagaggacctcatctggtgaacttgggcatgaatgagcacagcaaattagtggcagagcctagggcttattctgctaataggagcaattctaatgttggcatgcactcacacagggaaatgtgtgatatatgtttccatcacatagggaaagcattaaaaatctacatgcttggactttactcctaaatcagagatttggggtctacagaggtgttgaaaccctccctcaatcttggagggtgtattagtctgttctcacgctgctataaacaactgcctgagactaggtaatttataaaggaaagcagtttaattgactcacagttccacagggctggagaggcctcaggaaacttacaatcgtggtggaaggggaagtaaacacatccttcttcacatgataacaggaaggagaagaatgagtggggggaaaagccccttataaaaccatcagacctcaatgaacttactatcatgagaacagcagcatggtggtaaccgcccccatgatccagttacctccacggggtccctcccatgacacatggggattatgggaactacaatctagatgagatttgggtggggacatagccaaaccatatcagagggatacactgagatacaaggggataaagcagataaaaaggcaaactctagtcaattgaatttctcatatatctttcattctaacccgttcagatgtactaatttgtcacatgccatggttacttttccctttttagactttcaagttggaaaaagcttttttcagattcagaaagataaaatatcagccatgtattaaatgcattaaatgtttttctctcagctgcttttattccaaaatattttttttttttttttttttttttttagacggagtctcgctctgtcgcccaggccggactgcggactgcagtggcgcaatctcggctcactgcaagctccgcttcccgggttcacgccattctcctgcctcagcctcccgagtagctgggactacaggcgcccgccaccgcgcccggctaattttttgtatttttagtagagacggggtttcaccttgttagccaggatggtctcgatctcctgacctcatgatccacccgcctcggcctcccaaagtgctgggattacaggcgtgagccaccgcgcccggcctccaaaatattttcttaagggtcactgacaatcttgcaaggatgtaaatgacaagctgtatttgtttgttgacattatctatcaaagaggcttctaaacacttttgtgtttctgatgtgaataaaggaaatacaacattgaataataatccaggcaggttgcaggtggcataaggcttcagaactccaccatagaaatgaacgtgattggaaatgcagcaatcaacattttgacagaaaagtgaatgtttcaactgctttatgttcacaaattgtttctattttctttttgtattacaaaatgtaagcagtgtgagtttgtgtgtatatgtgtgtgtctatgtgtgtaaattcaaaggtttatcctgtaataagatagaatcagagatagactccttgctattctcaggttattttttccttgttcacatttttttacacttgagtaaaatacttctgcaagacatattggaatagttttgtgactaaatcctagaatttgcaaaatagtgaatcacaatataatgtttcctttggatactattttggccatacttggttggctttctggaagtatgaagtggaggtttcccagtgacacctgtagcagtgcttctcagggacatagaaagacaccaaattctcttatactgggattcatccaggtgaccagcatttgctttgcaacaatcatctgtggtgattgctcaagtgtagaagggttttcaagaactccatcatggagttttgtagtggcagattagctgtcctctacttctcctggagtggctgggattcttcaacaccaaaagaggcattgagtctttcttaattggcttcagtcagagagggtggggatatgtgaaacttctcagtctgatctgttcttcagctcctcagaaaagttctacagctactccagatctgtttcgataaaggggcggtggtgcaatgaaattattcataacagcccactttagaggtctgcctgaaaaaggtggagtatttttaatagtagatgtgttgagtgtcttatccatatcctttttaccgaggctggtgcacccagcccttgagatgccgagtacattatgttgcattcctcccaggggtggcacacaggcaatgactgactcgtatgagggtgtaaacgtgcagctcccttgcctctaggtgggatgtgggatctatgccagcactgtccaggataaagtcattaaatctagaaagtttacatggattcaatgaattcctctattcgaagtcttactatgtttaatagcaaaacaaaatagttacctaatgcagttcaatacattttgatatgttgttatgatgaagaaacatgaaaattctaaaaatgcccatttgttgattacagagcaattaagttttaaatgattcaagtgagtctaggaatgtaaatcttaaccattgcagaagtgaattaaacatgtttagagaaatcacaattagtcaaaaaaggtaaggtagattattctaccttaccacagggctcaacagggaactccacagggatcaagctcatctagatgccaaatctttgccagctccttcctctgccccatcctacatctctcactcccttacaggtttcccctaaatgcattcccttaataaatcatgggacaattattttcatctcagcctctgcttctgggaaacccagctaacaatatcgaatatggaaacatcaaacccctgaatataaccagggctgcctcttacttaaagactcatgcgtgaaatgacctgaagtgcttagaataatctaccttaccttttttgactaattgagatttctctaaacatgtttaattcacttctgcaatggttaagatttacattcctagactcattggaatcatttaaaacttaattgctctgtaatcaacaaatgggcatttttagaattttcatgtttcttcatcataacatcatatcaaagtgtattgaactgcattaggtaactattttgttttgctattaaacatagtaagacttcaaatagaggaattcattgaatccacttaaattttctagatttaatgactttatcctggacagtgctggcatagagataaacatttaattgatagcttattttatgaaaaatataacatggcaaaggtttacagttctgtttaatctcagcagtggcatgttaagaagacaaacggagattaggaaacattttttctaaataaaatacctcattttatgtggtactgataagcagtatttacaacatgaaataaattattcctcgtatacttattgaataccttaaaagtatgtgctaggagctgggaacccagagtaaaatataggtcttgttcctaagaggatacgtctattatggggagatgaaaggggggttaggggcaagcacagacttgtaaataatctatgagtaaacgtctatacaccagatttgcctagaggatggtgtatttgcgtggcaggacattgggtacagctttagcagtgaaaagagcaaagtgcaaagagaacctagaagaatgcaccactgggagctgactattattattttcattaaaggtgagtattgcataactaaaatatttcagctcaatgacctagttaaataaatcgttgtaataaataaaaatgtcttcctgtctttatgtaactgctcattttgtgaaaagcataacttggctgcacaccttttttccgccttcttctgataaattcttggagtccaaaaggtatctttcatttagtagatttttcaaaatgtttatattcatagcaagttctggtttgggtcaagcaggtggtagaaatcataactgcctccagaaatcaggagggcccacgcagtacaggacttggcaggccctggtggcctaaggtcagccagagtgcagatgcaatgcagcaactatagtaccagcattattctagaaagttcttacttcttggaagtactgacttgtaagtaaaagagcattttaacttgatcatattcactctggagtcttctacatctgaatctaaaggggaactgtattcttcctgcaaatttgggattctctaaataaagttccagggcaccagaggttccactgggttagacctttgatttattttaatgaagagcccttcttctttgttgatgtctgacagcacattcacagtgatccagtcatttttggggtaagatagaaggaatccaggtagaatacaatataaaaatgtctcaaactaggcaagagaagagtctagtcctgtggtaggtcatatttgtcaaaatatttgctaccctcttagctgttcatcctcactgagcctctctcttcaaaagattatccttcatatcccaacactgtgaggcttgagcacgtgctttgctttgaacaatgaaatacaagggaagcaatgtaatccatttctgagccaaaaaaattaagagccattgagtgattctgccaggcagtctcctgggtcatctccagaatctggagtgcagagccacagtgacccataatggacattgtgtaagcaagaaataagtatttgttattcataaattaccagtgttttgggcttgttactgcaacattgacccattggtagaaacaactcagcttctggttaatagggtattattttaaaatccgctatgaacattcatgtatagtaagtctttgtggatggacacaggctttctatttctcatagataaattttgtaagcaaatggcaaactgtttacaaagtggttctatgatttcactgtcccactagcagtgtatgagactttcagttgctccactttcttactaacactttgtatgacagcatctttttaattttagtcattctaatacatgggtagtgatattgcagtatggttttaatttgtatttccctaatgactaatgatgtgaaacaccttttctagtgcttatttgccatcccagtttcttatttggtaaagcgtctgtttatgctgattttaggagaatagtttcttttcttattttcagattttgagagttgttggctcatatatataggcatatatatatatatatgtacacatatctatatgtacacatatatatgtgtacatatatattagcatatatgtgtgtgtgtttttcttaatacaaatcctttctttagatatatgatttttcaaatattttctccaagtctgtggcatgtcttttcattcttataacaccgtctttcaaacagcataaatattttacttttataaaatctagttatcaatttgttcttttatggattttggtgtttgtgtcatatatatatataaatatttgcctaactcaaatattttatcctcttttttaataatttattttttagtttaggttttatgcttaggtcttataaaaaatattgagtcattccatctatgagcatggtatatctcttcatttacttagtttttaaatttctttcagtattgctttttagttttcagtgtataaatctttcatatttcttgcacttaggaaggcattcagctccttgatctatgagtttaaatttattctcaccaaatttgaacgtttttcagacattacgttctcaaatatttttctgcctctccccctctttcaaggactctaatgacttttacattagaccacttttctgggaacaagttccagactggaaaagtggtctaatgtaaacgttgtctaatgttccactgggaacaagtactgtgtgtagtgctgaccattgttaccccgaaatcttgaaatcttgtgggtagtctttcctcaaccttgggaagtcagtactcaagtgaatactcactgggatcctgtacagatcttcagagttattgctctctgaagctgttttccaatattcttttctgtgaactcaaattgccttaatcttcctggattctcagcaatatctcctcaactcagaatccctgggttctcctttcctgtaccaaggattgccaattctcacaagacaataagttgggttacgataggactcatctcatttgtttacctgcaccccaaggatcactgtcctttgttacctgacattctgtgtcttaaaaacggttgttttgtatgttttggctgttttttgtttgttcttttttttgtttttttgttttggttgttgtttcaggttgttgaggataattcttatccctgttaatccattttgacagtaagtagaaataacaaaattcacttataaattagtatatatattcttggttcaaggagtaatgggctaaagtaattttctccaaattgtgttatttgtcttggccacatcattaactagcaaacctactcagttttaataaatggttgctttgccaaccattttttttttttcaaccagcccctctctgttttaaaaagaaaattaagctacccactttctgtttacttacatagaattccactatttaggcttttgaaaatagcccttctgacttgtaaataacttatttgactctgtgtgtgagtcactcacttttatgtagcttgcattgttaactgcatcttccaaattgaattctggtaatgctgataaactgttcaaataggtcttttgtatgtttgcatcagagaaagttttatgggtatgtttggtataattaagtgctttttctctgtgtgtgtgtgtttgtgtgtgtgtgttttaaataacatggcataatgctaaataatccaagcaggaataatttgtttttattaagtcagattgccttctgtacatatgttggggagtaatttagtaggttatagtttcagtgtaataaaaaatggtggggttggggctggtggaaatgatgcctttcttctgtgcctaagtgataatgtaaacataagtcaggaactaagagtatctgtctgggaatatataataggatcaaacctaagcacaaatattcccagaggtagatttttcttatgctgatttagttatgaactggtaaatttgttttcatgactcaatttctacaaagcaaactttattatatatatatatgtgtgtgtgtgtgtgtgtgtgtgtgcatttttaatgtatgttcatttttttctgttgattttttaaattatgttcattacataagttcctaactgatagcattctcatcgtaaacaggtcaaactgttcagataaaataaaattcccttatatcaccttcttatctccagctgatttctttcccagaaggtaatcactgaaatgagcttggtgtgggcacctctcaatggggaccccaagatccccttctgtaacatacctgccacttttgaggtttgaatactcatgggctgctctccccttttcaaatgcctatccctgcaccatgattttctgttttagtcagtcctatatgtcatctatctttcactgatttctctcatttctggtcatcaagggcacccctttttattctatcatttggctgaaaaagtggcaaacatgaacactgacttaaaaaaaatactccaaaaataatttgagtttagagcaaaagcaaatctatcattggttaaaattttttgtgtaggttgtataacaaatttaattttcatgaatttctaaggttgtgattttacatcatttgattttagctaatagtttaattttatggtaggtttcattagaggagataaaaggctttggtttgcttcgtgtctctggaaaatttattaaatctccatagttttcagaacctagcaaatggtaagcttgtttccattctaactttatgagatgctttgtttcttgtaaagtgaattttgagagtgctgtgtgctttagcatcactggaagctgaacctcaggtagtagcccttaccttggtgtatgagagtctgcatgagtgctgtgtgctatagcatcactggaagctgaacctcaggtagtagcccttaccttggtgtacgagagtctgcatgagtgctgtgtgctatagcatcactggaagctgaacctcaggtagtagcccttaccttggtgtacgagagtctgcatgagtgctgtgtgctatagcatcactggaagccgaacctcaggtagtagcccttaccttggtgtatgagagtctgcatgagtgctgtgtgctatagcatcactggaagccgaacctcaggtagtagtccttaccttggtgtatgagagtctgcatgagtgctgtgtgctatagcatcactggaagctgaacctcaggtagtagcccttaccttggtgtatgagagtctgcatgagtgctgtgtgctttagcatcattggaaggtgaacctcaggtagcagtccttaccttggtgtatgagagtctgcatttccaccttcgaagattctgaaaaggaattaaaaagtagtgtcttgaatattggataaacttaagattacaagaaaacattctggaacatgactttcctcccgcttttgaagtttttcacttctttttctctagatctttttatagatgttcagaggcattttaggttgaattattatgtgtttaaggaattctaagataataattaccgggaaattaactcaaattacataatcatgtattcgagataagatacgttgtattgttgtggtaggcaaaaatgccatgacccagcagaatattttaaaattagcaatgtattttaaatacttgaacgctctctttcatttcagaagctagcctgcacttaagtcagaaaacaaaagctaactgccacagtgaatgaaatactttaggaagagaggagagaaaaacaggcttttctcattctgtaattctgagtgttctttaaatgtgtcagaatatttgctttgtccattttctgtgtcaatttctacttctttcttcttgctcagaaagtttcataatgctccctctaacataattaagtcatttatctttcctccctctcttgctgtttacttccttgcttccttccttctctaccacttctagtttacatagtaagggacttctttggcttttgggtagtaatttaagctccaaatttcagtttcatgttatgtaaaacacaaatgatacttaccgtatttcacatggttgttatgttgaggactgagccgcattatgtgagaaggctaaacatcatgtccttaatactgaatatatgttcttttccccttttccccttttctttcttctttgctgtcccactctgagactcctttcttccaactctgagatgtagttttaaatcttttatgaaaaaaaaaaaccttatggagaaagggagaagaggtggattcatgagcaggaggagaatgataactgaacttttggcatcagcatttactatggctagtcaccattttaagcctgtcactaaatgaagttatattcatttagtctcattacaattctatgaaagtgctatcattatgtctattttatacttaaggaagcaaagtcttagattaaggcaagatcacatagccagtaagtaatggggtcaaaatgcagaccttaacattttggcttcagactctgtactttgagttcagccggtgtttgtggactttgccttaccttcctttcttttttttttttttttttgagacggagtctcgctgtgtcgcccaggatggggtgcagtggtgccatctcggctcactgaaagctccacctcccgggttcacgccattctcctgcctcagcttcctgagtagctgggactacaggcgcccgccaccatggccggctaattttttgtatttttagtagagacggggtttcaccctgttagccaagatagtctggatctcctgacctcgtgatccgcctgccttggccttccgaagtgctgggattacaggcgtgagccaccgcgcctggccgatttaccttccttacttaaccaatcatgccactagcttgcactggcctcaatacccaacgtttttcctaccttagggaccttttcctaccgtggggcctttgtattctctattccatcctttctgcaatttttccagatctttccagctcagcaaaattgccatctctccacattgccttcttcactctattcaaagtaacgaagggtacttcccccaaagcaactgatgttcccgtggcttgctttattaatcacaataggacatgatcttctacattaggttttcctccatgttttctggcagcctctgaaggatatgagccataacagagcatagacattgcttttttctttgtagcttaatctccagtgcctagtatcattcccagcatataatatgtttaatgtgaactgaatgagaaaactaaatgagaggcttaattttatacagcagtgaaggtatgtcccagacttataatttaaggagaacttactctctagaaatgtggagtagctggacgtggtggctcaagcctgtaatccaagcacttcgggaggccgaggtgggtggatgacttgagcccagaagttcgagaccagcctcggcaacatggcaagaccccatctctgcaaaaaaaaaaaaaaaaaaaatacaaaaattagccaggcaggggatgcgcctgtagtcccagctactcaggagactgaggtgggaggatcacttgagcctgggagatggaggctgcattaagcagtgatcgcgccactgcgccccagagagagagggagatgcagggtaattgatttgtacctttactttgaaatgtttaataattagtgattttctcagtcctctctttttctcatgggcccctttagtaaatgctgatggacaagattcacaggccatactttaaagccattgatggaggtagattttcttcccagggtgcttttttggcatggagttggctaagaatgtccttaaaggccatcatacataggtggaaagtagaaatcagttcaaagaaagactggcagagcagatcataagtcaatacatgaatcaagttggcctgtatcctaccaagtacaatcttttgtttagtggtgtatctactaccacactctcaaactcctaatgatactttaaaattaaccttcatgctcatttttataataatgttgaaggtcaggcaagagataatatcctcactttacaggtggaggaactgagtcaaagaagtacaggacttgtataaagaaaagctagtctatatgatgtctctaaatcctgggtctgaactactttaacgatattaaaagcttgcttgacataaaattttaagactgttacgattagagtgaatgtcagtgatatatgtgtctaaggaatttgataaatatacatgagatgctctaatgaattcaattgcttggaagtgaaggggaaaatgcacaaatttttacttaggctcatgcttttcatgtagaaacaaacattgaaatttggaagtgaaaaatctacctcttatcttgggtatatatgctgcctatatatatgcatatagtaagatgtttaagtttttaaaattaactgcattgttgaatatttgaaatacacatctgttatttgttattgaactttaaaatgatatatgaggatttaggtaaatactgtctgtctaaaattaattttggaaagtaactcataagatgatattttcaatacagttttgccagcaattattaaatatgtttcgagaagaaaattgctattcaaattacccatctcatccttggcactttctaaaaaccagacaaatattttttagtttgtgaaggctgctcataacagttacaagctaattaattataaaagatttagccatgcatttgaccataaaatagattggttgtggctgctggattatagttttagatgattttatgatccatgtattgccttgacttactgatgatttaaatgattgtgtgtgggtgatttaaaaagcaataagattaataaaatatttattttgggtaaaggtacagaatatgttttgaataaataaagtatggaaaaggtatctaaattcctcatacatttttaaaatcagttaataaatagtaaacatgcaagaagctcattaactatagaaatttagcctattaattagggagtgttcatttttaaccactatgttcattttctagtctagtacataatatttttcacaagtcttcagaacctcatttttccttttatataataatgactctccaaatatctttttgtttcttggtcattatttatcttttaataagacaataaaaccaataataaaagtgtattcctatagccaatagccaagaatcaaaatatgcctttatgggtttttcttttcttttctttttgagatagagtcttgctctgttgccaggctggagtgcagtggcacgatctcagctcactgcaatcgctgcctcccaggataaagtgattcacctgccctagcctcccaagtaactggaattacaggcacgtgccaccacgcccgggtaattttttgtatttcagtaagatggagtttcaccatgttggccaagatggtctcgatctcctgacctcatgatctgcctgcctcggcctcccaaagttctgggattacaggcgtgagccaccacgcccgaccacctttatgttattttatttaaccttcaaataattatataaaattgatattatttctttactccaccaatgcttattgggcaactaacaactatgaacccttctgagaatttggggtacagtggcaaaataaagttgtcaaagggccctgtccccttggggatcacaatctcaaggcggcggggaacatccggaaataagatagttatagttggtgatgcattaccagagacgtgtgatgccataatagtgactaacccaaggacagtgagttagcttttgttgcataaattacccccaaaatttagtggcttaagacaactctttgtttaggctcatgtttcggctatttgaaatttggggtaggcccagctagctgtttctgctgatgtacgtcagactaagttcagttagaggaacttataggagagctgtgaacttccagatgagtcgaagacaggctgagggtatcctcaactgagatggcttatttctgtgtcacatggtggtggtagggatcccaagtacagcacgggtcattagtaaagcagacgttctggccttcatttcattcttttgagtgtatgctgtataaaaattgaccaaattatccacaaatcttcctgtaccacttgtcaaggttgaaaacccaagaaaaaataagattctttctatcactggagtgatattactgagcttttcagagtctattctcatgccaagatgtatgtttgttaaattttgagccggatgtggttttcattcagaaagtatttgatgatgacttctcaagcaaggaataactataatagcttatgtgcttttgggatattttaggtaagggtgaaaataataattctgagaaacatacaagtattgcttttttcttcacattccctaattttcttcttttgtacattccacggaacaatgccttctcatatattcacctgacgtgttgaacatcaatataggattgaatgaagcaaaaccttatgtatgagttacactggagaaaatcaaataactatatatttttttctggcattagaaagtcagaaagatatacagaattagtgccaatgactgtatcagttgttcaatgaagagaagataaagaggtcatatagcagagaattgtatttgtatactcttgtctataaaatttagaacattttggttgttgtttaaatttatataagcttgttttattcttggtatatgtgccaatatctaccctttaaaatccatgccattcaggtagctcaaaggatatactcaactctgacatttgtaataagtgaataggctaacttgctgcaatttgataaaaacagaagcacacattaagttaaatatttgtggagatttgggtgtgattcacaaaacttttctctcattttatttttcattaattcattcaaccaatgcatactagaagtgtattatttgttaggcattgttttcggtgcagggaacactgataaataaacaggtaatgttactgctgcctttgagcttctagtctattaaacattagatggacaagtcagtctttctactttttagaaacaaccagcagataatatttgttaacaaaagtcatgatgtaaggaatttactaaaggaattcagaaaagattacatatttttctggttacataatataagaaatttactgaaagattatagaaaagattatgactaaactgtatccagtattttagtgatttgtttagcagattattaatttaggtaaaggtcattttgattggaaacatctatcaaatcagtccatgaggtaaaagaaagcaaaagaaagcagagtctaacaaaggagacagaacattttaataagagatacctttaaattatattttataccatacgaattggtctctttgtttgagaattcaaatattttacagccaataccacatacatttacattcggattctatatactcttctagtttctagttatatacagatatttcagataataagaaccaaatcttgcctcaaatgctaacatcgtggatgacaacatagagcctactgtaatccattgtgatatgagcaatgatggtaggtttgacagctgcatagggatcacaggagaaactgtacctgagctgtacctgtatcaaacaactacataattttttctgtcattgggaagtcagaaagatatacagaatcagtgccatacctgagagttcaactgtgtgcaaatagctcacaccgtctctaagtgttttatttctataataagaaaggtaagatttaccaaactctttcttctttatttttattatacatcctttattagtgattactagcccatgctcaaatgttagcttgcctcgaatcaaatcctagagtcactcttaattatttttatggtattaggtaagtgatttcacctccctaagacatagtttcttcttccataatatgagatttatgaggaaggtcctaacttgtagtagggtggtcaggaggcttaagtgaaatcatagctaaaacagttaacaattcctgaaaccacacaagtacactggatatcctgactattggtacttgtattcatacttgcatttataatacgcatttctcagataccccaacagttcatatccagacacccccaatggatacacctgagactgataccaggtcatcatttttcgttctcatgctgccagctacacaagaggcacgcactgtggatccacagacgaaacagacagaggctatgttccattcaagacctggaacagatgatcccttttccacgacaaggaccaacctctgccaaaacaaatcacttggcacaatttctaactctaaattaatgtcttcacttatttgcttaataactccctccatcctcgctgtcagatcaggctaggagagactccattggatgagcagtagactgctcttccccaggtgcctagcacagtgcctgatgcaccacacgctctcagtgtgtgcttgttgaagaaacaaagacacagtctgcccttttcattgaaagcagtgccccaaggcagcgggtccaatccaggtcacctccattgtgccttcccatgagggcttgctcaaccctctcccacctcctgtggccacctctctagagaagcttcttccagcttgccagacagtctagcttggaatgctgaacagcatccctggtccttctgaattttctagctggggaagcaaaatgtcagtctatgattaatcccacacaataggtggtaagaaacataccgatgccatatcttggcctgaggcacaactcttctatggagttgagtttcctgtaaattcgtggctgttgattgttagtgtgcagtcttaaggccttaacatgtatttataaacagtcttctttttaaaagtgcaggagcagtgtatatagtatgcggtatgccactattttttttaaaaaagatatatcgcatatatatatatatatatatatatatgactttttcttgcttgtattatccctatgttttattttattctccaaagttgatattgttttcttctaaggaatgcaattccaaaaaaacaaatattgaaaccaataaagacataaaatttatggttaatagcttcatttcatttgttaaatgtaattaacgtatctttttattactaagattatttaccattttaatgtatataatgactattgcattagattttatttttaaaatgctgttacgcaaacttaaaaccaaaattaccagtgttctatgggacagctctaaatacagtatagctattaaaaatatatattcttaaagtgtgctaggaagaaaaaacacttgacatgaactattctgacatttaaatcttctcttattcttgtcagcactgccacagcaaatgataaaggtggtattaatagccatataattttctgaaatttttgtaacattttttaactcacaaggcagctggacatgtttacagcttgaaatcttttattgcattatttgtaagatattaatatatggatatcatatatgaaggaaataaaatgcataattattttctggcacattgacttgcatttaattaaatagttttttcctacttaagttcatctatctatcgaacatttctatgttctagttattctttgaacaactgccttcttatagataagaaaattttcggtttgctgattggtaaattggtagttactcctccatttttggttcttgttagttttctaacactaggttcaaactcttgaagaaaatattttgttctgcatgcacctttgcagaattcttcgaaaatttgctggcagaatagttgtagaaaaccccaattacagataataattttgccattttcctgatgacccctagagaggaataaatttgcaaaattagtttaattttgttttactcctgtgtcttgtgctttctcatttcctttcctcaagttatagaaaatacataagcccagtacagattcagtcccctcttccactctactctggccagtcacctctcttcatcaatcctggggatgactaaagagaagtagggaatatatgatccttccactgaccagctatgtgcagggacatttggcaactgagttgacctttatctggacaatgatagaatgagaacccctcttagaggttaatgtgaagatcaaattagttaatagaagggaagacactttggaaagtgaaccacaaaggccaccagtaggagtagaatactaggaaatgatctttctaaatgccaatctggtcaagtgcttcctgcagcctgtctccaacaatacaaagtatccaagctccttagaatggcattcagatctctaaggatagctgatggcttcttggactgccctttgattcctaagagatactgcccatggtttttcctttcctcaaattcctggtaagacacctctgtcttccttctacacactattcaataccgtcttctctttgacatgaccttttccttccacctcttttcacttctctcttacttgcagggttaggagacacctgctatgtgagtgtatgtaaaccatacttcacagagcaagccttaaaaaaataccagctttcatcctttttccttcccttcctattaaaccctatacagtcatatgtacaatgtattgaataagtatggtgagaaaagaaagtgatatatttgtatttcttgtacagtcttctacaaatctctgaaattagacatgactgtgatttttttttaaaataagtggatgttaggatctgggctaatagggttgggggtctgagggagacttttcattgtatacattgatttgatcttttgaatttttaatcatgggaatatatttctcatgtcaatattaagtaacataaataaaaatttagtataaaattttaagtctagaaaagtcgaatgtaaaagtttcattcactcgcctaatatctaaattatgtgacttacaagcatatggtggagaaaagaatatggctcccattatcaatatttcctcccttccccttgtcctatttctcctccattactcagtagaacactctgacatccttagggttgaagcagaggtggagaggagagttaaggagcataaagattttacttgaaaggcattggtttaatcagtttttggcagctgagcttgacagaaaaacaatgtatttctcagtctggctatggtcccattgcagatcaagagggggctgtgctctgtgtcacctccactctaaggcccagtgacggagcctgcaccgtttctaatgtttccggttactgtggcagaaggaaaaagcatatgacgaatcacacactggctcttcaaatgtctgcccagaagtgacacagtccccttgagctataagttcctggtcaaaacaaacaacatggccacacctaacttcgaagtgggcagagacatgcagtgacccatgtatctaaaaatactaaaaataatggtaaatagcactgataaatattttctgaaaaatataaatcaagagtggaattccttttaatttttcatttagttatagtttgggctgtgagatggttgtgttacacatgaaattcacataattagaaaactataggtgagtatgctttaaccccctgccccaacttcctcctctttctttgttcttgttttcttcccctcctctttcgcttatattttcctctgacctcaccctaaaaacacagtttaacctacaaggtaccagaataccaaaccaaaccaaccaaacaaaaacaacaacaaaaattgggtgccctctggaatgtttggctccaaaaaaaatattgaaatctatagcaccactgaaatgtctaatattaccaatgtggcattaataaatggacagtcgtgctcttttgtagcttttctctctggaaggaagatattggatagtttttgttttttagagacaaggtcttactttgtcacacaggctgaagttcagtggaacgacattggcttattgcagcttgacctcctgggctcaagtaatccttctacctcaacctctagagtagctaggactacatcaccaagccgggctacttattttgaaagttttggtagagatgggctcttgctatgttgtccaggatggtctcaaactcctggcctcagcaatcctcctggaggccttgatatccaaaagtgctgggattacatgtgtgagcccctgtacctagccagatagttcttactgtgacaaggggacaagaagccttttctcagggaggaccaatggcaattctttttaccccacactctcaacaatgattcttccaggaccatttccatttcttcagtctattgcctcctttctcattgagtggcgagcactcttgagacccagcagtttgctctatctcaacccactgtgacaaataggtaaacataggctgggatgtaaggaatggataatggatactggttttagttaccccaccagagacattttaagttaatgcaattgatgagtaaagcaacatgtatggttctctctcaccaggagaggaaaggaatagaaagaatagagaaatatagcctactagtcagtttggtgtttgttccaaaataaaccctaaaatctttgcagaggcaaattgcttattactgtaccgtcaagtgaaatgctccatgaaatatgttctgttttgctagacgtgtttggacaatttcctgaaactgttaaactgctcaatggtattaactcttctccaacaggccattagaaattttagcatttaaaagagagaagagggaaaatacagttggctcagttgagaagcaatctcttggagctggtaattatgtcacatctgtttggagaaacaagttggcctttaagagagtgaatggggtaacaatttaattaaagatgggttagattgcatggaaattacttgctattattattggaggaatctatcaaaatggaccactgggaaagcactgttttcactgtttcttgaggaaattgttcttggcataacagtagaatttaacttccttttctgaatgtaagtttcagccctgctgtatggaggagtgagatcattgcatagggtctgtgcacttccccagtttctgttttcttcctttcttactcagatgctgttcttttataactttgtttaacataacacttgagccaacatggtatgatctggtttgtggtcgctttctttggtttgcaagaattttggaaggtattatttgcgtttaaaacaaactatttgcctattggccatctggccagtaattccagcatagaattctaagctctgtgaacttgaacctaactcaattgaacttgctaatctaataataagtctattgccccacctcaatattaccagtgggatggtagaaggttttataagcacctcagtttttttctcagtgtgaaatcatctatatcaatctttttggtgctgtaccctatactgaacatggaaattccaccatttaacgtgctaaacagctagcaaagaactattccatagatattgaacttgaaaactatacattttaataagccaaagtacatcaggaaaaatcagagctttaatgaagctacaattgtagatatgttaaaaaagacaccaagttcattgtaaatgaatttccatttgttggttgattatttatagggtgaattgccaaaaaagatagagttaaataatcagtccatctaactgaccttaactaatgtaaaattactttctgtaagcccaggttagttataaaaagattgaccctttaccgcagtttatctgatataatctcagattaattaatcttgattagtttgttatttgcctcagatttttaattttaaaaggatattattggaattgtactttttaaaatagttttaataaaaatattacataggtctattcatataataaaactatagtagaaccttgaacaaaatagaggtgaggagagctgactctttacatagtcaaaaatccacttataactcttgactccctaaaaacttaatgactaagagcctactgttgaccaggagccttaccaataacatagtcaattaacacatattttgtatgctatgtattgtatactgtattcttacaataaagtaaggtagagaaaataaaatgctactaagaaaattgcaaggaagagaaaatatatttactattagttaagtggaagtggatcatcataaaggtcttcatcctgtttgtcatcacgttgagtaggccatggaggagggggcatgggaggacttggtcttactgtctcagggatggcaaaggcagaagaaaatcagaatataagttaatcttgcaactcaaactcatgattttcaaggatcaactgtaatttcttagtaataaaccctttagtctcacaagtgtcatgatttgaacaacaaattgtatggtcacgttggtcaccctaggtagaaatttgctgatttcagcaaattggaagttactgcatgattgtcaggatctgagaaagcaactgagaagtaatagttacaataagttacaaaccttttaggacggtgaacattttaaggcgtatgttttctccatgtgtcacaaccaacagtaaacaaagatcaaaatcatggtagaaaagcaggatttaatggacatcagagaaattgcagatctggaatacaaggcaataaaaatttacaacaaggaagtggtaagccagagagagctgcttcatggtggtaggcccagggggattggagagagtggtgccagaaagttggatagaaaagttaatgcaacaattataaagaagataagaacgtagtatttgaaaataaatattttaacaagataaatataatacaaaaaatggaataagaaaaatacattattatcgaatattctgtattgagttttggaagtttatgtgtctccttttctaatgccatgattttgcaatgcattattgttagtaatttttaggtctgcctatccaaattaggcttttgcagcatctaacaccctccaccctagctcacttggtgggtgagcctccaatgactacacccaaggaggatttaacacagggattttatgacttgcaacaagtcaggaggacatggggttggggtagttcagcagtgcctgtctgaacaaaggtgaaaattgggcttttattgggctgatcaagggggagtaaaggcagccaggagcagtcgcctgtcatgcttctacctatattgcatgtatagaaaagggaaaataaactccttcctgggcagggttttagtatgctaaggaggggagttattcaacttcaatccaactcaagcatcagcattgctgcgtccatcccagttttgttttgctggggctgaacttcttcctataactttttgaaacaacaagaactcaaggtgtgacagttacaagtgggccctttttcacagtgtgtacctaaacacgtgaggaccctggattacagaatgacagactcgaagtgactcaagttccggttgttcatctttagatggtaaagatggctgtacgtactatccttgcttatttccaatctattgtttaaactcttgtatatgtaataccgcagaggctagagatacaacctttgaccaaatgagtgaattcaagtaatccattactaatgtgatctggaaacaaacatggtgttgaatgtgcatatgtcagttctatgttgggagttcactataagtaggagttctctaaaagcacttccacgtagaatgcaatgattatttaaaaataagtaataaaaatgtgcaaatttaaaacatgtatatgctttgaattatatatatatatatgaattatattttactatgtatacaatgaaaactgaacagtaacctcagctattgtataaaagtgaaaccaacaaaagattttttggggaggaagattattttactactgacataaagaattgccaggaaacaatgacagcaaacacaaccaacttttagttgccatttaagaaaaattctttcagataatgcattcctttattacttgaacggagggcagaccactccgtccattctacccttggcacacatcacttcctaaactgtcttattgcttttaattgtatattttttcccttaatttcaattaaaatctataattcattagccgtcaaaacctgacctgtttgaagtagtagcaattcaacattaaacctcgactagtgttgaataatattttggggctttgtgttgtatgctacagagtgaccccccccaagttccttgcccatgtgtggctagacaatggaaatagttccgtgcttcaacatgttccccaaacacattccacaggagagcgcatccgagcatcaattcttgtaagacaactgggaaatgaagtcataatttgagctgaagcaaggaagattattaaatatattttccatgtgctttgaaaatatatgcaaagtaaagcaatcagtgcttgccactttgtttgtattctaaaagaaagctagttaaggtttttcatcaaactgtattcttctttaggcttataaagtaccatgaagaggaggtaaagagagagtggatatttcagtggctaaacccaaagttttttagcatttagactatggcaccctctagaaaagcaatttaaaatgtgaaaaaagagaggacagttaaaaaatagattagatagataggtagatagatggataacaggtaggtagacagatgattgataaagagataggcagatcatagatagatagatagatagatagatagatagatagatagatagatagatagatagcatgaagatggttgaggtgactacaccctatgcttccttctgaagtttcgggaataattgttcattttccaagtgactgctcaatacaacattgctctgttaggtaatttaatgactggtgtaagtacaaaaaacattgccatctgctttgtttcttttggccttaattataatgttatcttcttttcagaggctatattgtgaaacacttattattcaccattatttctggcagtgattataatttatgaccaacagtgcagcactgaataatgtcttgattgattgactgattaatgtagattttgtaggtgataagggacaaaaagcctgagaagattttctggaaatgtaaaagtaattttattttctactatgtttgatgcccaaagatcactgtactgataattttagtgaataaagtgtcaactataacaaggagcttgtttattctatcaaccatgtgatttcaaaactggagcttgctttcacttttgaaattttccataagctaaatctaatcctctatatttacaacgaaattaattttctgagttatttattttaggataactctgatctttttcttttctttttctttttttttttttttttttaagatggagtttcactcttgttgcccagactggagtgcagtggcgcgatcttggctcactgcaacctctgcctcccaggttcaagcgattctcctgcctcagcctcccaagaagcagggattacaggcatgggccaccacgcccagctaattttttttttgtatttttagtagaggcgaggtttcgccatgttggccaggctggtttccaacccctgaccacaggtgatccgcccgcctcggcctcccaaagtgctgggattacaggcgtgagccaccgtgcccggcaaccctgatctttttcaaactgcaatttaaaatttactgatcacacagaactgaattgatttttaattgtcattctgaagaagtaattaaactttaattactacttctgaaagagagggtttttactaggactttttctgacaggacaataatttcattttttgcaatttttatttataattggcaaataatgattacatatgtttatggggtacaatgtgatgctatgtgtatatattgttgaatgattagatcaaactagttatcatatccatcacctcacacactaatcattattttgtagtgagaacacttaaaatctgcactgttagcaattttgaaatatatattattattaattatggtcaccatgctgtgcaatagatctcaaaaattattcctcctgtctaactgaaactttgtaccttttgattaacatctctgtctcagcctctggtaaccaccattctactctctacttctgtaagtttgatttttttagattccacatataagtgaaatcataacagtatttacttatctttctctacctggctcatttcacttagcgtaacttcctccaagttcattcatgttgttgcaaatgacagaatttgcttcttttttttaaggctgaacagtgtatatatacatacaaaacatttctttatccattcattaactgatgaatggagataaatatatataaaacatttcttcatccattgattaactgatggacacttaggttggttccatatcttgcctgttgtgaataatacttcaagaacataggagagtggatatttctttaacagttgatttcaaatcctttggatatgaacatggaaatgagattggtgaattctagggtaattctattttcagttctttgaggcatatctatactgttttccctaattggctatactagtttatattcctgccaactgtgtacaggggttccctttactccacattctcgccaacgttcgttatcttttgtctttttgatgatagccattctaacaggtatgagctgatatctcactgttgttttaattttaatttctctgacaattagtgatattgagcattttttcataaactggttgaccatttgtatatctactttcaagaaatgtctatttaaattctttacccatttttttaaaaaattcgattctttgttttctgctataagattgtttgagttccttatatattttggatattcactccttatcagatgtgtggtttgcaaatattttctctcgctctgggttgtctcttcagcacagaaatggacagtcgcacgttaccacctgtatgatcattattttaaacacaagcaggaaaagcttttgggttccaaagtttcagtcattatgattgaaaaactgccaaactggtagtgaaacatttattggattggggattaagctattcattcttttcgcattaaaacaatgatgtagttttattcgtaaatctataaagttaagtgcacagtcatcacttttagtacgttctgattcattgaaatcctgtaaaattttatggaaaaatctgtgtaaacaagctttaaataaggcaatattccaataccaaaactcgggatttaggcataggtgctatatttacaattcttaagtaattttcatgtatttcacatatttttaaaactcatgttacaaaatagcctaattctctttactttctgtgtatgagggaggaattaacattttgtaatataaacctcccaaaagttattcagaatatttctaaaataaactgttttagattcttggagaaattctgtgatgtcaaaatctctttcctttttttaaacaataaaaaacattgtggctttgtttttttaattgataaataataattatatacatttatggggtgcatttatggggtgcaatgtatacatatatcaaattttaccccatattgtacattgggtacaatctgtaccctcataatacaaattgtaccccaatgtacaatatggggagcaatttgatacatgtatacattgtggaaggagtaaatccgactaatatatccattacctcacgtacttatcatttctttgtggtacaaacatttcaaattcattctcttagcaattttgaactatacgttattattaactctagtcacctaatgtttaatggatcaccaggaattattcctcttgtctaatggaaactttgtaccctttgaccatcatctccccttttacctcccaccctctcccaacgtctggtagctaccattctacttcctacctctacgagttcgaatttttagattccacatataaatgagatcatgtaatatttgtccttctgtgcctggcttattttacttagtataatggcttcatttttttaaaatgtttaaaccaaaggtttcaatacataaatctagacacaaacaagtactgtgtgattccattttttataaagttcaagaacaagcaaagttgatcaaagacaagagacaagaaactttcagtagtgttggacatattctttaatctttgtggaggccacacagggatatagatgtgaagaaattcactaagctatgcagtcagtattagagcccctggatgtacatgtgttatgcagtaatgaagggcacacacacactcattcattcacacacagcaaaagcaatctatgaagtgacaacacgacacagtgaacactgttttcatggtaaagttgcaataagacaaattacattatttttacagtataaacaattatattcaattaaatgcacgaagtgtgctagaatatattggataattcggaacgaatacctatactgcaggtgctgaagccaagagagaaacatccccattgaagtattgtaagaattctgtcccccctgccagttgctatgagatatcactgaaatatggtagtgttttctaaaatctactgcatgaggataggacaaacatgctttcagtgaaatgataaaacgctaccagaactaaaagaaacaaaagtggtcaggtgcagtggctcatgcttgtaatcccagcactttgggaggccaaggcagaaagatcgcttgagctcaggagttcaagaccagcctgggcaaaatagtaagacctctgtctctattaaaaaaaaagttaaaaataacaacaaaaaattagctgggcatggtggtgtgtgcctgtagtcccagctaccaggaggctaaggtgggaagatggcttgccccagcaggttgaggctgcagtgagccaagatcatgccaccccattccagcctggacaacacagtccctgtctcaaaaaaatcaaaaaagaagaagaagaaaaagtattttaaacctgtcattaagaagaaaaaagatgtaattacacacttagggaggccagagtgggcagattgcttgatcccaggagtttgaaaccagcctgggtgggccgggcatggtggctcacgcctgtaattctagcacttttggtaggccgaggtgggcagattgcctgagctcaggagttcgagaccaacctgggcaacacggcgaaaccctgtctctactaaaaatagaaaaattagccaggcgtggtggcgtgagcctgtagtcccagctactcgggaggctgaggcagtggaatcacttgaacctgggaggcggaggttgtagtgagctgagattaggccactacactccagcctgcgctgggcaacagagcgagactccatctccaaaaaaaaaaaaaaaaaggaaaaaagaaaccagcctgggcaacatggcaaaactccatctctacagaaaaatacaaaaaaaaattagcaaggcatggtggtgtgcacctgtagtcccagctactcagaggctgagaagaaaacagattatctaccgtaataaagcaagaaacccaatccctaaacaatactgtgccccatagagtaaagccgtttcatttctcttttagtactttttctaccctaacaaagaaaattgtggctaaaagttaaaacaaaaacagtatctttttgctagtttcatgatatatcttgtatgtatgtatgggtgaatattcttatattattatttttggttcatgtaaagtaatttttccaagtgaatatctaagaccaatgcttctgaaactttaatagtcatacaaatcacctgaggattttgttaaaactaatattcatctccaggagttcaggggttaggctaagattctgagtttccaataagtacccaggtgatagtaatgctactggcctacacactactctttgagtaataaggtcttagattaaagtggacttgggcccactaacattgattagcttatgacaggaagacaaaaaacaaaaacaaaggaacaaacaaaaacatagaaggtaaaatgttaaaatcaaggcacaaagtattgctgtatggaaagtgtctgaattttcaatatattcagccctggaggaagagcttcccactaccacttatttactgtttctgttctaaactggctataatagcccttcaattatagagctgtttcagtaatagcatctgcttcattataacagcagttttattaaactaatagttgttagcatgaagacaccattacagtaaattacatttataattatggctctaaatatactcaggttgcatacaattattaaaaatttccaccctaatcatttacctttcctgaagctttcctcctatcacatagatgctgtgagcgtgtgttagtgtatgcaggcttttctatgaggctgctttcctatatcccatacaattattcaaactgatgcctggtgtatctagaaatttgtattcctagctcagagagcagctaattagaacctccttcccaatctctacttcccacaatctgggtcatttccttgtttagtgccttgatcagaaataatttattgtctggttgtgcatggctttgagggaggcacaatataaagaaaagttcatataagaaatgtgcacatttaacatcaatgcataacaaacaccccaaagcatagtggcttcagctaaaaactgtctatcattgcatttgggacagctgggagtgcttatctagatttggctcagctgggcaggttagttaaggtggctctgttacacagtgtctttattagtctgttctcatgctgctaataaagacatacccaagaatgggtaatttataaaggaaaaaggtttaatggattctacatggctggggaggcctcacactcatggcagaaggcaaaggaagagcaaagtcacatcttacatggcaacaggcaagggggcgtaaggaggggaacttcccattgtaaaaccatcagctcttgtgagacttgttcactaacatgaaaatggcacaggaaagaccctcccccctgattcagttacttcccatcaagcccctcccacaacacgtgggaattatgggagctacaattctagaaagacttggtctgggacacagccaaaccgtatcatcatctcacatgtcccctctgagcccaggtcctcctggcagtgacccaagcacatgagaacacattcaaccatgacagcacatttcaagcctccgcttcattgcttctgataatattactctggccaaagccagttacatagttaagctcaacttgtgttaattttgcccacaatgaggccaaagcaagtcacatggccaagatcaacataaatggagcagagaagtgtcatctcctatggaagtgaacagaaatgagtgatcatttcagaacaacaacctactctatcagagatagtttcccttttatacatgtaagtacaataatgttgaaagtctctgagtttattttcataacatgctaaatagccacagtcttatttagccaaattacaaacattggaattgcatggtttcttttagaatctaaggtttttatagaaaatataacatcatatatatatatatatatatatatatatatatatatatgtattccattttgatgctatatactactagtcagtcacctgtaagagtttttgactaaagttttcggcaagatagatatagttgagtcatggtcaaggtgaaaagggtattcactcaacaagaaaaccatccatcaaagatttcctatgtgccctttgttacggctgtgcagctaagtacaacacagttccaggctttacagttcttagagtgtttacagacaaataagtaagatgctcaatatgaggtggtaggtcctgtgtactgggtgtatgccagatttcacaaggagtgagtttaaccactggacagcagagtgggtgctagagctgactcttgaaggatcagaaaaaattcaccacaatagaggggttgggcgttccacatatagagatgacattgggctgcattcggggagcccacaagtaatggcatagaagtgtttgtgtctgatatccccttccagacatcccacaacctaaagagctagacactgagggggcctgcatggtgagcctagagccaactcaagatgcaggaacaaaacagaatttattggaacatagaaagatatgaaacaacagtagttgctctgagaggcgtcgtctacatttgaaattgctgggtgttgtgctgaacccttattaaccccaataaggaaggcacaagattcaagaagccaaagaagagacccagaggcaacaaatgagacatggggttttattaaggctcacatacaggggagagaggccagtggtggtgagctaaatatgataacctcatagcccagtggcagtgggctgggcgggaaaacagcaactgctagcaatcagcatgcactttatatagcatttccacttaacaccctcccccagtgacctccacctggcaaccttcatattgtaacctaaaactctgggcctcaatcccctgtacggcctgtgttccacaggactgaataggatgggaccggggctcagatgttcctcatggacaaggaatgaatctctggattggctactcctggattccctagttcagaacatacattcaggtgctatacaaggtcattctaaggttatgcttaagttattgctgtcaggtatgtttatcctacaccaggttgataagacaatgatgtcatcagtcagagccacataaacttgacagccattaaaagtttatcttcctggctaggcgtggtggctcacacctgtaatcctagcactttgggaggctgaggcaggtggatcatgagatcaagagatcaagaccatcctggccaacatggtgaaaccccgtctctactaaaaatacaaaatttagctgggcttggtggcatgcgcctgtagtcccagctactcaggaggctgaggcaggagaatcgcttgaacccaggaggcggaggttgcagtgagccaagatcgcaccactgcacaccagcctggtgacagagggagactctgtctcaaaaaaaaaaaaattatcctattttatttgtttttaagataggttctcgctctgtcacccaggctggagtgcagtagcaatatcataacttacttgtcttcattgactaatgaatcccaacatgctgagtttgattgtcaccttttctctcccagcttcagcaatactatatgtttagaattatagaattttttcacagctcacaaaggagcctctcaggggtgggatgtaggataggactgaagaaagaaaaccctactggggagaaaatatcaagtggagactgagtattcatttctactctttgctaaagagtagttaatgtactcacagtttatgttcagaacattgtcagtttcagagaaagatttcattagttcattagtttatctataaatttatccatcctgtacttattgggcatctactacagcagcagtccccagcatttttggcaccagagatgggtttcatgaaagacaatttttccatggaccagggcagcaggttgggagggctgatggtttcaggatgattcgagtgcattaaatttattgtgcactttattttattattacattatagtctataatgaaatacttatacaactcaccataatgtagaatcaatgggaaccctaagcttgttttcctgcaactagatggtcccatctgggggtgatggaagacagtgaaagatcatcaggtgttagattctcataaggagcatgcaaagtagatcccttgcatgcaaagttcccagtggggttcttgctcctataagaatctaatgctggggccaatctgacaggaggcagagctcaggtggtgatgggagcaagggggagcggctgtaaatacagatgaagcttcacttgcttgcctgctgctcacctcctgctgtgcagcctggttcttagcaggccacagactgatagcggtccatggctcaggggttggggactcctgtactacagcatgccagacaaaatgcccactgaggttggaaatgaagcgaaaacagacacactccttgctttctcggtagcttacagactggagagtaagaagggcattcctacagtggtgaatactatagaggagtagtagacaacgtgtgtgagtgcatttagtatggagctgggagacatttatgggaggaaagataaggaaaaacttctccgatgaagggactttaatctgacatcagaaagaagagtagtagcaaactaggtaaacaaggatggggatgaggaagtaggaggtacaaaatacaaaacgaaacaaagcacagaatatctcccagaacaaagccctcttcatcctgcctgctctctctcccccatagtgattgacagtttgaggaagggggttattcttagggatcagaatatttttgtataactgcttccattttgtataattgcctagtttcccagggtaaataaaggcaggagacacattcagggccaaatacagaactctatattcttacttgagaaacacaccaaaatgatatgcaaatattactatgtagtatttatgtcttccttctctccccaaaattcccatgtgaaaataaattttctatgacctatatactgtcattttgcttaatcattttaaggcaatatgaggacatcatgtattaaatcctggagaattcttagttttcagatttcttgttggatatttcctgatcaataatgtgcaaagggagatgatatttgggccagaaccatcagtttaagcgtctctatattataagaaattctgactcaggctacttaatgtagtttcttttttaaagcatgaatgctttaaagttcatgttttagtcaagaaggaattgcattttctcaaacctggcaggcccagaaaaaagctacttagaaaatcacacttaggtgacagaatgataagaaaagtccctttaggggccattagcactttgcctgaagaaaaactgttagtggttcttcctagctttttaacttacagaagcagcactgttggaaagctcttggtaaaaacaacagaagtaaagcagtttattttggaatctcatgttaggaattccagaatatcccattggttaattttaagttagagtccttattattgcaatttccatcataatagacatattatatttgtaataggtggtgggacaaagactagagtttggatatatcatagaaatctatataccaaactttcattaactattttgccagttaaccatggccaactgatttttttttctttgttcacctcctccataaagttagatctaagattcaagtaacaacctatgcacctttttctaacagtactttattaaagtacaatttacctttagtaaaatgcacaaatgttaaatgtacatcacacagaactttaacaaatatacaaactcatctaacatccagatcaagatatggaatgtcaccccaaaaattccatgttgccctattttagctaaccactccacgactaaaggcaactgctatccaatttctgtgggtataaataacttttatttcttttcaacttcatatcagtaggaccatacagtatgtagtctttggggtctggcttcttttactcaaaatctgtgcattttgaggatttctgaaatattaaggatagcccagggcttctgcaaatgtcagatggacatacaactcaatttatataaacactgtgggaagtaagctaatatttgttaacctgaaagtttctgattatcatgaaatgtccctaggcagggactatgttgttagctacacaatatctaagaaaactatcctaagacaaattaaatatagaaataaaatcacaggcaatagcagatatatctaagcttcttatagataagctcatcccaagtactcttgaggtgcaaaaagaaaaggctaattataaattattcttatccatttattgaggctgttcccttaagggctaattctaggtaatgcttcattaaccttgtatcagttacttgttcttgaatttcaaaaattcattttttccataatttttattaattcagtgaggccctccttctcatttgtacaaattagtaagatgtcaacctacatgtggagttctggagattcatcttaagacttataaaagggaaaaaaaaaaagaataagtaaaggtattgagggcctactacgtgctgatggccaaggtactttcacctacattaacaaatcaaatcatttcaataggccctgtagggtggctcatgtctgtaatcccagcactttgagatgctcaggtgggtggatggcttgagcccaggagttcaagaacagcctgggcaacatggagaaaaccagtctctataaaaagtagcaaaaattagctgggtgtggtggtgtgtgccttcctcccagttacttgggaggctgaggtgggagaatcacttaagctcaggaagttgaggctgcagtgaattgtgatggagtgagactgcctaaaaaaaatcctttcaataaattatgattcacagaatccaatacatccaatgatccaatggaatgctagttcaaatacattggtacttaagcatggactgcattctaaaagttcacctctaactcagctattttatcatagaaacacagatatataactaaacaccactttttcaagaaaaggtaaaattgtgaattgcatttcaaccacacagaaaccaaacaaagttcgggagtgcaaactatattctccttctttcttaacatcagatttttccattgtagcaaatgtgattaggcagggccttgactaaatcactagaacagtgagtgctgacactaaagctggaagctaaaaatgcctccagaagattgtccttgagagccaagagtcaccttctcctgtgataggcagtctgctactatccccatgcaccctaaagctggtatgcaaggactctctaatcctgtggtatgaaaattcagtcgcctcacctcaaggctagacagatacagagatgcaatgtaggatctggagctccccttggattgaacacacatcttgcttcccttcttcccttacaagcgtttcctgagagcccttcttcaataaatcattttctaagaatctctgttacctccccatctcaggctctgcttctaggggaaaccaatttaatacacccattttatctatgacatcatcctcattctggcctgtggttacgctaacaatttatcttctcctggagtccactaagaaggacaaaagccattcagaatagaccaataaaattcaaagcctagtcttcttccagcaccctatgatctacactttctccccaactgacacacgtggtcaagcagaatgcaacgcccttttcttggaacccagaaaagacaaattaaggaaaatgagtttggaacaatgaaacagtctcctgtgcaaataaagcagacactaccattttaagtatgaataattggaaaacaaggcattgaatagtcttaattacaataagtatacgaagcttgcattagtcttaattacaataaatataagaagttttaaaactaagtgttctaagccacaaaaaagtaaaatatgtccttgtttgtacattatttcaaacataggaggataattaagataagaatgtgaaataaaggcttatctttatttaagactaatttgttgaggcaagaaagttggtggggtgggatgaggcccctgcttctcaaataaggaaatcttaaattaaatcaatgccagtcaattgctgggacattttagtcaaactgggtgtaatgtgctggttaagctatcaaataaaatgttggccatagagcatgattcgtggtcctcaatggaatcggcagttgaggatgagattgctgtagatgctcatcatcctctacagaagtgatgaactgagagcttgtatctttgaaagggtcatataatccttggacaaagggggtagtaggcctgttatccctgctgcctttattcatccacccatctaaacaaccctcccctcagtgtttactgaatgccaactctgtgccaggaactagtctagacactagggatatagtagaaagagaatgtatacggctcaggaagttgtgatttagtgaggattcaaaagaaagattagcaagtctttggagcaaaaattagagtcaagaggaagttttgcaaatgatcctgatcataacaaatatgtgtgtgtgtgtgtgtgtgtgtgtgtgtgtatggagagagacgacaacaaatatatatatatttggctctctctctctctctctctctctctctctctatatatatatatatatatatatatggagagagacaacacctccaaagaaaagagaaaaaaaggaaagcacatgaccgtgaacgaatctagcagtatgagaatttgattgaaagtctcagggaagacctgagatatagtgaatagttggccacagatatggtgttagtagcagacatcagttgggttactgaacaacacttttaaacccactaaaaggggacaaatggaatttactcagagcttagtatattaaggttactcagatcattgcgcattgggagggaagaagatgcttgtgcattgtcagagttgaaaactagagactgtgtgcctgagaaatgcccagtgagacacagaggaagcaactccacggatgcagaaaccatgccacccagaggcctgcatggggagcgtgtgttgtatggaatcaactgggcggagttaatacgtgaaatttcacattaactaattaattaattggttaatcaactgattgattttaaaataccaaaaagcttccaacaatcatttcaaaatttgatatatatgttgaaaaatacagcaacaaaacaaagtataaaatacaaacaaaatcttaatttatttcaatgctatgtattaaaagccttcatatccaaaaaatagcaagattgttattaaatacatttacatactctagtcaaaactataatattctataaactaacattagagaagatgcttgaagaaaaataaacatttaaaatacacccatatggctttaggaattcagaaaattcaataaatcatgaaaaaaatgaacctcctgggttttgttttgttttttcctttgagggaggggaggggaacactatgagttttctctttctttttattttttcagtttctttctacaggatacctaagcctaggtcaattgtttttaataacttcgttttgctaatcggtcatggcacttgtttctctccttaaatgcaaattaggatgagaataaccttgtaaacgtgtctttgtcttctcaaggtcatgtttggccaacagtatcagtcagggtttctttttccttttttaagcaggcagccatgttctgattaaatatttataagtctagttgagtaaagttaaacggagcagatgaggcaattaagaagtaaaaccaagtgtcaaactgcagggtctccttaaatgatgcaagaccttgggatcctgacacttttcattgacactctttgtaagccagagttgttttgtttgtatgaaaagtggcagtgctgtctaagatttactgatccctgtttagaagtcatctaaaaataatatctgagtaactcaaaccctctccattttccccagaaatagttttactgtaggggtgagatgtaggagagggagggagcgtctgtgtactgccacagctgggaacattactgcacctacttcctagtgccttgcaggcatctttgggacttgctaagaacctttggagaagtgtaagcagaggttaattgttcaaccacctgcttttagaaagatataaattttatatatgtaaaataatttttaaaatcatgattaatagcctatatcccttcagttacttttacaaagccttccaatgtccagaaggaaactgctgacagtgacatttatggagaagggggaaaaaaaagtaatttttcaactcaaattgaagggcagtggatagagaggggaacataaattcattataaaatatcttcttaacccatatatatagccaaaaaaaaaaggagctaattgcagaccaattatggaaaaaacctgaccttgggagaaaggcatgctatttatttataatcagtattaaggatttagaagcattttcaaggtttgcatttatttggggttgaaatgtcataaatatctgtcagcatggcaatattctagttaatttgattttggtgttgataaggccaagttcaaataatcaatctcaattaggctgattaatttcacactaaaaaactgtactgaggggacacaatttacttaaaccctaattgaccgtgttgtgcctttgggcacagagagatcttaaaaaggagaaatcagggaaatcactatacacaaacactggaaaaactgacttaattttcttgtttttaccaacaattggttgtgttgttgtcaaatggataaagtagaactttaaagaaaaatcaactttgtgcagtctcttaaaaatacctgaatgaaatgaaataaaattcataaaattctatccaacaattgaaaaaaacagctttttttttttttgcttggaggctagaggatgatgatgagtagctctattctgttagctctttctgtagctctattctgttaaattgtcatgacatttgttcagctcctaaaaaatgaaaattgggattgaaaatcaatttttagtattttttttccaaagcatcagcatacttgaagcctgtgttactatgaatggttacccttaaaatgaaagaatagttgttacttttggagcgggatagtaaccaggatagggcatatgagtggcttatgaaacacactaaatatcctatatcatgatcagcggtggagatacctgagtatgttaattttgtgaaacctcattgatttacacgctaatgatttatgcacatacaattttacttccttgatactctaattttttaagttgtaaaaaggaatttatatttaaaaaaaggttggactcctatgttcatttctataaatgaagctgtcacacagacctgaaattttatttgagcactggctctatcattttcttttgatgatgatgtttctttgatgtatgcatttttatcaaatatatctaatttgatgtttctttgatgcatttttacctagcttttaactgggacctggtttctgtagtgtaaaaatctatttgcaatttctagtgtattatactatttaatgccttcttctcatttggaactagaaaatcacttgggttaaatggtgtccagctgccttcagagataagccctggctttgacttattaatacatttccatcggcctttcctggtaataaacattcttactgtcctccaatatggtaaaatatttagcgtaagagtagtcttggctcacagtatagttgttgaatccatgctgtttttcagtcattggctgctctgttcattacattctatacaattttgtatactgatgtcttggggttttaattgaattttaatgaaaaaatggcccggattagcagtaatatggccagctgtgggctgcaatgttaatatgcacctactgtttcaatttgctggtaaagctgataatgactgaagagggcagctaatgcaaaaaactatgcctggcaattacatcaagtcaggttttcacccctcatctttagcagcttgcctccagcttttaataaagagcagagcaaaacagggccagttcaagcatcctctgatgtttgtttagacttttctctgttgactgagcatttgtaattttaaaggtctggtctctagtgtagttatgggcagtggtgtcagacacatctgggtgatgccagacacacttgagtatgcattcttcagccatactagccctgtaagatttagtaaggtaattttatatcttttagcttcagatttcttatacagaaaaatgggtataattgtatctttttcttggattattaaaaagattaaatgaaattatggatataaattccttaaatagcacctagtatccatttctgagctcaccaaatggtgaccattatttttgttaaatatgcttcaggttttccccatcaatatcaaaaattaagattggacttggaataaaagttctattttatattttaaatcttacaaatgaaaataaataaacagcatggattcaataactatactgcgagtcaagactactcttattacactgaatgttttaccatattggaagacagtaagaatgttggttgcccagggaaggccaatggaaaggcaagtcaaagccagggctagtaaagtatatgatttcacttatatgaagtataaacacaagtacaatcattttatgggattaatgtcaaaatagtagttccttttgtgaggcatagtacagtctggaagaagcagaagggtttccaagatgctgaaaatgttccatttcttcatctgggccatagttgttgtattttatatacgtaaaaattcatcaagctgtaaacttaagatctatgcacattattgtaattatgttacaactcaataaaaaggaaagggcttagcaacaatttttttaattaattgaaaaaataaactagcacagacctttgggaaattaaaaagtcataacagtgctcagtaatcccacccctagtttctctattcaatattctgatagcagaactattccagtaacagataaaatattatgtatatgaaggtgttcaatgcagcatttcctattttagaaaagcgacactgaaaacaatataaaataaatgtctaataatgtggtaacaatgacataattgatgatgcatcaattccaaaattatgcagtcatcaagaataactacattatgtaaaatggtgcagccactttagagggctctttggcagtgtcttataaaactaaacatacctcagccctatgactcagcaattccacttctgcatttctaccaatgtaaatgaagacatatgaatccacacaatgacttttacatcaatgttcataacagctttattcataacagccaaaaactgaaagcaatctaaatgtctatcaataggacaatggatgaagaaatgatgatgtattcatacagtgcagtaaaactcaggaatataataacatgaatagatctaaaaaaagttgaatgaaagaagccagacacaaaagttattccattcataacaggttacattctaagttattccattcatacgaggttctagaaggggcaaattagtctgtggtgacagatattagaacagtgatttacctctagtgggaaggtcaggaactggcttgtgatgaagatactctatcttctttggcaggatctacagcagccatcatatgacactgaggatctgcccagtaaaaatgtaaaagtttcagtcctaaaattgttgagctggtgaaccaatgccgggatttccgtaactcttacataaaagaaagtaaagccttatttgttcaatccattatagctggtaacattctgtaaaagaggacgcaaaaggcacccatgaccaatactagataatacgtattcaatcattagacccttttatgaaaacaaggggcgaaaagtgctgcgacaattcccagagaaattgaaatggatatttcctatataatgctaaaagagcatcagatatgaagtaagagggtgtgaggagaagctgctaactacataatgcttcaacagtgaaaaaaacagttctacacaataaccttctaacgattcctcattgtggacgggtaggtggtttgtacttccagtcccttcagtatcagatgtttatcatatatcaaaatcacacacttgatgtttttcctttgtactgaaatttttaacttgttttcattctatttcaagaaatattgatgaatcattttgaattatgctgttatgaagacattcatgtaaatctgtagtaacatcataattgtatttaattatgtatccatttatcattttccaaaagattaaaccatgcacaaaaatacccctctgtgttctttacggcagtattaatagttgcatatacctaggagaaaaaggcaatttaaattttctcccatgttattttagatgtattttactcctcctcctcaaagtgggtatgaacagcaacacttcccccagaacctctcgcatatgctcaaggaacatttgcagggattttatatagtccgtcctctctttggatatgtttttaaaaataaggaaaagtttcatcttttaaggaagtgccttttattgacattcaactagttactgacagatttttactgttcagtctcttaaaagggtttgaaggaatgagaactgggtagttgtgttgctggtcattttaacgttattttatttattttctcagtagttaatacaagcattgtactgcagtcacaaaattcagaaggaggaaataagctagtctccctcacaccctccttctccagccatcctgtgcccttccccagatgtaatattttcaaatagtttaacgtacgtttctgtgctgattactttttttgctatttccaacaatgttgctatgaatattcttgtcattgcccccaagtgcacatgatttcaagagttctgtaactcttggagtataacaaggactagaatttttgcattgtatgctatgagtattttcagcctagctatgtataattagttactgttttccagatagttctcatttatcttcccatcaggagtggaggagagctgtgtggctccacatccttgctcataactgtcagtgtcaagcttttcaatctggtgtgtatgaaatcatatttcactgtgattaaaatgtgaatgttctggactaacaaagttgagcatcttttcggatgtttattcaggttttcacttctatgaagtatcttttcaagtgttctgcacatttgtttttctctgttgagtttcttggattttttcttattgactcataaagcatctctcatatgctttggatgtaggtatttgtcagttatatttttaaatgcctaaattggatgcagcattccctaacttcaagtctgtcttattttctaaagtaaatatttaagaccatttcttcttaagccttaactacatcttacaagctttgatacctaatatatttgctataatctacttgttaatacagtctgatttccattatttctcctttgatccatgaattgtttagaagtatgtttttgtatctataaaaaaaggagtattccttgtaactttttgattatttatttaaactaaattgcattataatcaaagaatatgttcagcatgataccaatacttcaaaatttgataagattagctttattactaaaatgtggttaggttttacgaatgcccacatgtacttcgacatgtatattctccactcaatcaaaatagtacattgcacttttcaactattatatgtctttactgttggcctacaatcacaagagtctgatttgtccattattaatgaacactttcagtttttatattcaagcatttggtttgatccaggtttatttttatataaagtgtgaaactaagttcaggctgtttttttccccagattccagttgtaacaatagtttttattgaataattatctttttcattaccaatttgttttgtcaagtttgctacataccaaattgtcttatttttatttacttatggatttttattttatttcattaatctattcatgcaagaatgggacatttttattaggtgacagtaatgaaaatttaaactaggttttgatgcagtgatatactgatggacccaaggtagaaaattaaactagatttagaagagagaatttagaaaaatgaatagggtcatggtcttttttgtctaaaggagagtgtgtgaataataagtggaaatgaaaaacctcagcagagggaagtacacattgttaacaattattcagacccatgtaacaaaagaccgtaattctctgctctgtaaaagaattatattaaagagacaaatgtcacactaaatgatacttgcaggacttacacaggtctctagagaaaagagtgagtataattagtacatgtgttatgatgttttgattctagtccaaaccaactagattaaatacatttactttttgaacaaaaatggcaagacataattattacaattggaatgtgatagtaatatatataatatgtatatcttagtgtgtgtgtatttatatatgtatgtatgtattccttgtgcctaaaacacttcctgctaggaaattaagccagccttctatatttgtactcacaatctatcctccaagatatgtagagttgataaaaattaatgcttgcctacaaaatttcagcaatgcttctcctatctctgtacctcccctctgtatacatttgaaaaattaatcctgaccatcccaggaggtagaaaggaaagggtggtaaaataaatagttccttgagattttataaattcatccagattaaaatatatatatatatgtatatgcacacttgtcttgaaaaagttgtgatgatgttatatatcagaaataaaaaattgtttccactcatccaaaagtttaggactcacaaatttttttcaagcagaaataattttgtttcataaatttggtttaatttcttttgattacataaaaaactagaaatggaaatttatgtatatagcaatgtaaaaatgatagtgagtttaatgctaaaatctgatctactgggctctgtttaacctaatacccaaagcttaagtaatggttaagttggggtttagaggggcctattaccttcttcagggcattggtattttgtttcctaccttaatctaaaattagtgtcttatttgccagtctaatatattttacaatcaatctacattgcctaccttttggagtatttctatttaaataaaacaaaatgagcgtttaaactgggaacgtattagattcttctgagctattgagcagtatcagatccttcagcaagaaagctgttttatcatttactaagtacctaggcacagcatcaccttgcccattaaaagccctgtcaggtacacatttgggttgctaggcagctgctggggaagcaatctcttccacacatatggtttatgccacctggcctgcatttcacaccaacctccccaaacttcccagggagttgcaagagaggtcctcatgttcctgtcttcactttccatttccctgtcataagcactccatttgttgtcagctttcattaaggacatttccaggagctaaatatggtagatttctattaactgattctaaagattcacattaaacagaaatagagcaaaaccataaagccatctgtggaatttgagagtatggaggggaatatattaagattaaaagataatcccggttacacttccattttcatgacatttgataaaaacactttggaggaaggagaagaaatgggccagtgagagggaggaagaagaaagagacctggaaaggaaaaaaggcaggaaggcagatggaaggagaggtacagaaggatgaatggaaggaggaaatgcaattttttttcttcctttttattttattttattttattattatgatactttaagttgtagggtacatgtgcacaatgtacaggttagttacatatgtatacatgtgccatgctggtgtgctgcacccattaactcatcatttagcattaggtatatctcctaatgctatccctcccccctccccctaccccacaatagtccccagagtgtgatgttccccttcctgtgtccatgtgttctcattgttcaattcccacctatgagtgagaacatgcggtgtttggttttttgtccttgcgacagtttactgagaatgatgatttccaatttcatccatgtccccaaaaaggacatgaactcatcattttttatggctgcatagcattccatggtgtatatgtgccacattttcttaatccagtctatcattgttggacatttgggttggttccaagtctttgctattgtgaataatgccgcaataaacatacgtgtgcatgtgtctttatagcagcatgatttatattcctttgggtatatacccagtaatgggatggctgggtcaaatggtatttctagttctagatccctgagaaatcgccacactgacttccacaatggttgaactagtttacagtcccaccaacagtgtaaaaatgttcctatttctccacatcctctccagcacctgttgtttcctgactgtttaatgattgctgttctaactggtgtgagatggtatctcattgtggttttgatttacatttctctgatggccagtgatggtgagcattttttcatgtgttttttggctgcataaatgtcttcttttgagaagtgtctgttcgtgtccttcacccactttttgatggggttgtttgtttttttcttgtaaatttgtttgagttcattgtagattctggatattagccctttgtcagatgagtaggttgcggaaattttctcccattttgtaggttgcctgttcactctgatggtagtttcttttgctgtgcagaagctctttagtttaattagatccgatttgtcaattttgtcttttgttgacattgcttttggtgttttagacatgaagtccttgcccatgcctatgtcctgaatggtaatgcctaggttttcttctcgggtttttatggttttacgtctaacgtttaggtctttaatccatcttgaattaatttttgtataaggtgtaaggaaggcatcatctttgagatgaatgtgaatgatcgtggaatattccttctgtgacagactttatttttgagacaggatctcactctgtcatccatgctgctgtgcagtggtgcaatcacagctcagtgcagccttgaactcctgggctcaaggaacactcctagcctccccagcagctgggactacaggtacaggcgctgccatgcccggttattctggcttcaagcaattctcccacctcagcctcccaaagtgctggacttacaggcaggagccactgcgcccccggcccttgtgacagacttttaatgaaaccattatatttacttctttgacagcctgttactatgtcaattcctccagccactacaaaacctgtcctcatggtttagagcattggcagtcactccctaaaattggagtggagtgaggaaggcagttctgtaggaggggcttatggactccttaagggcataggctgttggagtccctgctgagagatctctgccctaccttgtggaactggagtgaaacaacgggggcgttgcttccagccatctgggagagaggatccagagcttcccctcagagagctgggatgttgtcagcaggcatcagacagagcaaaaagccatttttctttattctattcctgatacaaagcaactgagatatgcgtttctctttggaattgaggaagggagaataatggagcttttgcggtgatggacagggaaaaagtgggggagcagttaattatccatcttgacaggtgtagacacaggctgggaagctgggtgtgtcttaatccctgctcctgaaccaccgtggggagcaggaagcctacagtttccttatatcagcaaatgcatcatgttgaaacaattttactgcttgctttctgaatttaaatatagattttccctgagaagggctcaagcatgcagatggtaagaaaaacaacagtctagaaagatatcttcaagttccttctcctggttggtggaaatagagcaattcttttccaaaatataatttttagagttttaaagtaaaaaaaaaaaaaaaaaggatagagtcaatttggaatttcttagctgaccattctattagagcataggtttttcagaaaatagagattatgggcaaaaaaaaaaaaaaaaaaaaaaaaggaaagaaaactgttttaagtatgatatcttcagtgtaatatatagttaacatatactattttgttgtaattagaatatgcaattattatatattaaacatatctacatctgtagtaaaatgtgttgtcctacatttcagaaaactataaggcttttgggaaagaaaatttaggagtatacattaaaagccatgtcaatgccattccctttaacatagtagttccatttctaagggaaagaagttaaaaaattgaataaactcacatgcatgaaaatgtttcaattataatcatgaaaaaggaaataatataagtaaccaggatagaggattgattagggtagttgctctcaattttgccccccagtggacatttggcaaaggacagcgcccctacaacagagttatccagcccaaaatgtgagtagctccaaggttcataaactgtacattagtgtaattagagtgtactgactcaacagaagaatgtgcagtctttaaagctcatattataaaggctaagcttcaacatgaaaaattattttgatataataaaagagaaaataacaggatgctatttcatatatacattattatggtcaaaggtagttttaccatgatgctggtgaaactttagttgcaggatctctcacttacggaagcccttcaaaggcccttacggaggctgtaactgtgtttcatatggttataggcttttgtataaatttttaaactaagattattttaattttattttaatataatatttttctttttccctcctgaagttatacaagtttcaggcaccactaaacttgattttcctttgactatcattttaaggaaatgaaacttaatgcacatgatggaggaaaaagaatgtgatgagaaattaccaaatagctaactgaagtcatgtaaggatgaggggataatggagaaacatttttctcttctctagtttccaggtgttttccagagctattatattagtttataatgaaagaaatgattcttaagagaaagaaagttcatggatatacaagaagaaaaaaaaatttggaaaaaaaccaccatgttaggcgccggatgagtttgttgtggtttgagttttgatcttctcatgctgatctttccggctttgtagttctctctcctctcgtacttctccatcattcatgcttgtgtccaaccacagtattttactaagagagcatgtgttctagtgccctattgctgcagagcaaaccacccaaaaaacctacataggctctgctgggtggttctcactgggggcctctcaaacagttgcagcaagatggtggttgaagctgaagtcatctgaaggctcactgggctagacatcccaggtgatcatcactcaccggccccatatctcagtgctcctatctgtagcatctcctgacagcagagtagccaggtcttcctacatggccacttggtactacaaaaggcaagaagaaagtgccagtcctcttaacaactagatcgagaactgagagagaatccattttaccatattcagtggttcaacacaatcccaagccagcacagattaaaggggatgcaagggtagactcctttgctgcatgggggaatatcatacagtgcggcaaaggaagggcttgatggaagcctttgaacacaagctaccacagcaaagaacatttgatttccaagattcccataaggtagggagggatatgcaatatagagcaagcatcttccctagaaatatgcatgtgataaaaatatctacctacagagatattgttagcagtggaagttattcaagttagtaatggcaaattcatacgggtctgcagcaacctcaattcttgcttcctcagaagaaagaatttgactgaggggcataaggcagaagacgagatagaggcaagttttagagtaggagtgaaagtttattaaaaagctttagagcagaaatgaaaagaaagtaaagtacacttggaagagggtcatgtggacatcttggaggtcaagtgcactgtttgatcccggacttacagtttttacatgctgtcctacttcctgcatcttttgtcccttttccggtggaatgccctccgaaggtcatataccagttaaactttgccattttgcctcttaatgtacatgtgtgagctcactcgcccaactcctgagatctcatgaggaagctgcgcatcaccagtttcaggtatttcctatctatatagggagactgcctttccctggtgctggctgtgaccaattattattttagagagacagttaacagccacctgcccagggtcacctgactttcttggtggggtgtggggggagccctttcctgccccgctcatgcctgactagctacctactgtaacaccatgtgtaacaccatgaacacaaaatgaatatttctgacaatcagctatagagtgtaaaagcttttaagtagcactttgccagttagaatgctctaaaatggagcctcctaaaattctccaatataataattttctacggaaatctatcagaatagagcagtgacacccagaggaaatttggaaatgtttagtagtatagtgttttatgcattttaaaataaacaataactaatattttaattggaattttttgagaaaagatacaagctactttcaactgaagaaaagtgtcccgagctaaaaagactacctttgcatcatcatagactgcttgatagaacaactaaggaagtaaatgaaacggaactcactagaggccacctgaatcatcaacaaattagtcaatcagaaatgttgactagagtccctctttgatgaataacaaaattcttattctgtttccaaatgtaagaataaatgaccagggctgttatttgctctaggggattaatattctgtacattcagttaatcttgcttgtgattaatcagcaaatagtcaagacaattaaaatatacacatatcttatgaaataaagagatatttgcaaatatcaacaaaaaaggacattatgtaaaaaattcacttattagaagcatgtcagtaggccacaaattaactaaccctaagcattattttgctttctttgtagcacattccccttatatggtactcttttctgggaaacatggtcttgctctgttgcccaggctggagtgcagtgttgcaatcatggctcactgcaggctcaagctcctgggctcaaatgatcctcccacctcaaaagcttttctagtagctaggaccacaggttatgccacacctggctaatctttaaaaaatgttttgtagaaatggagtctccctatgttgcccacccttgtcttgagctcctaggcttaagtgatcctcctgccttgggctactaaagtgttgggattacaggtatgagccactgtgcccagctgataaggtactcttttatgtcagacatattaaacaaccctatttattgatatcaaagtacaatgcaccaattctgtgaccagaaaatgagacaataaataaaaactatcttaaactttctattccccattttatttttacagctaacttttttttttttttttttgagatggagtcccactgtgtcacccaggctggagtgcaatggtgccatctctgctcactgcaacctctgcctcccgggttcaagtggttctcctgcctcagccttctgagtagctgggattacaggcgcctgccaccacgccagctaatttttgtattttcagtagagacagggtttcactgtctcaggctggtcctgaactcctgacctcaggatccacccgcctcagactctcaaagtgctggggttacaggcatgagccactgtgcctggcctacagctaactccttaactacccctctccttaaaaaagtaatcaaatattttcatcgtgcccttaattctcattttcagtttgtcatagctgtagaataaatggaacttaggattaatacagaacaatttcttcagttacttactctatatgacaaatggaaccagttatatgaatgctaagacctagtatcttgaagactctcaagtaaaaaaatgctctggggaaaataatttaaaaccatttgtctctggttttgacacacttcaaacaaacttgtacaatatattttcccaacctgaacatattcattcattcaaggacagatcagtcacccaatggacatatatttagcaatgattctatgtgtaatcatgattctgggaacatagaattaaagatgattaacaagttaaaacgtctccctttgaggtcgggaaatattcacctgactttactgttatactgttttatcccccagtgcctaatattatgcttggaacagggtagatacttgcctcttttctttattttctttctttctttctttctttccttctttctttctttctttctttctttctttctttctttctttctttctttctttctttctttttctttttccttccttccttcctttcttttcctttcccttcctttcttctttctcttttttctgtcctctttccttccttctttccttccttccttccttcctttctctcttccatttgttgttctttgtttttttgttatttaaataagtaacattaataaaacacactggtggaaataaacagaagtgagaacataaacagcttaggtgactgggatttaagcatatggctttctatgtcttagcaaccctcatgtggttggaggttgtcagtcttattccccatttgacctccagcattagcccagaggctggacaaaagaagtaatcaattaataattgatatcaaaataaatgattcagtgtcttttcaacataggacaacacagtcagtgaggctaacaagaatgatatcaatttttcaagatgttaaatgctacacattatactatactaaagaaaaaagaaagtttgcatcacttttttttcatttatctggaaaatttatttatattgaagttctcatttagttttggtgcctgatgaatgagctattacttgatattctcttgctttctcaataaccatctcatctagaaagcagggtgggacttctcttttttttacttttctgacgtggtgaagcgtctatcagaacatctttcctctcattggcagctcactacggagcttgcaaaggttcacaggtggctgaaacccaacccagttgtaaatcacaacatgggtacatcttgcatattttagaagacagaaaagaaaataccttgtcagccagcaatcagaagcacattatatctcagaaagtctgccccttgtgcctgtcagcctgaatgggacctttcacacaaaccttcctgccaattcacttagagcagccagacaactccctccctcccatctttcaaattactccacatgtctaagttttcctttaaaatgtttccaaaccactggagcacacctctcatcacagacccccattgatgagagacaggattaaggttatgtcagatataactgatgattagagttatttccaccttctccacagttgttgacagacagcaaataaaggcaacattgttagacctacaattgatctattgaagttaggacttatttcttgactcctgaaaatacaaccttctaccagggctattctaagccagtgatttagagccctgatgccctgtatttatttattttttttactaatttttccactgctatgcaatgaggcatatcattattattattgtaaccgcctggctctcagtggcatgtgcacaaacacccagaaagtaaaggcatacagaagcctccgttaacgttgagaagggacagacaccataattgttttccactgttccttccattttaaacagtggggatcttacctatgttaagcatttctaggtgaagcatagactgcttaagagctgtatgagtagaaattaggaatttaggcttcagatccaaccccacctgggttggtatttgggtttcaacatatagtagctttgtaactgctggtgtgccactaatgctctccaaatattaaggaaggctttgaatgctattccaagatgtttaggctttcttccacaggcagaagagagcctttgaaagccttggagcagatgagtaacatagtagaaaaaaatacttcgagataacttgcaaagaggagttgtcaatctccaggatttgctcagctccattctccttctgggcacatggaagttctctgtgtctggcactgcattggttctccaaatctcacaaacagtgcactgaatgactgtgatgattgaataattgaccaagaaacccagataatgaaaggaagaaagagaaagaaagaaagaaagaaagaaagaaagaaagaaagaaagaaataaagaaaggaaggaagatagtaatgaaatgtgggcatggttgactaatgtatgagagttcatcagatgtataacttacttttcttttgaataatttgtatttatttattgagcattacctggataaaatacataactagttccatgcttcacttaatggtttaattatcaagaagttttgaatcaatactgacctgcaagcaatgtctcaaatctggaagctaccaagaattctgagatccaagttttctttcaaacttccctcccttttgcattttgaagtggtagtacaatttggatcagataaagaggaacaaggtggtttcagctagctgcagaacacagatatgacttcattacccagctgttagtaattttcctcccagtcggaggcagaattttgaatagactgaaaacatgtttgtgcagggttctaagatgctacatgaattcagatattcattcatttaattcatataatagcctcagatgatatctttctttctcaccacaaggctatgctttgtctaaatggccaggtaaacatcccagaagtgagtggtccctgaagtggtccgtgaaccgatttccacgaccggttctttcctacgtgtgaaccgtgctctgctgcaatctactagtgcctcgggcattcctgcggcctttgtctaagcagaaagggtagaacttcctgaacactaataaaggaaacataaaagcagaggtcagctggaagattggcaataggctaatgaaactgacagtcatttttgaccattttaaacaataagtttgttgcccctacatcctccacattagctgcccagtcttgtcaagtgacacacgggatattatgttgaatttttaaggtgcttcttggctgtgaatatggcctgggatctttctttccttttaataatacttagcacataattgttctgaaatcacatgttggaaaagctcttgactagaaatgttgagagcgggggagaaaaagaacagcacttaagaaaagaatggaaaagtttcagtgacatttgcaaaattgcttttccttctgatttggttgggaaaattatttttcagactctagggaattattgtttctcacacacttcatataagaatatatttcaagccagaaaggaccttagaggtggtgctcagtgtccttcgttcagatcagggaaggaaactgaagccgagggacgttaattgaattgcctctgttgtggctgcaaagtcagccagtgaaaacaaaaattctctaggaagccagctttgtttccttatatttaaaagtcattcactcatgtattcatttggccacagactatgtattgcacagctattaatattatgtggcaggccatatcaaggcatggagaatacagtggtaaacagaacagatcaaacctctgcccttatgttggtgataaatgctctagcaccttggtaatcaaaatacctccgtattagcagtttatcggaaatgcagaatctcaggccccaccccagatctattggatcagaatatcctttaaacaacatcctcctggagtttcatatgcattttcaagttgagaagaaatagataaaaaaataagtaaaataaggaaaataggaagagtttggggagcttaatgggagattatgtaagagagatatgtggaggtcaaatgcccagggctctgtgggttatttgaaggacgtgggcttttgctctgagtggggtggcaaaactggagaggattttgagacaaggcatggtgtaatgtgactaagtataaattctatgtagcacagccttaaatgttagagaggtagaaaacagatcagtggcggcctggcaacaggggataggccacaaaagggcacaagaaacttttaagggtaatagaaatattctgtaccttgatggtaatggaattacactcatgtatatatttgtcaaaactcatctattggtgcacttagaatgaatgcatttcgttatttgtaaactacttccaaagagttccaaaaaaaaaaaaaaacctgttggacacatctgatacggtttggctgtgccgtcacccaaatcatcttgaattgtagctcccataatccctgtgtgtcatgggagggaccttgggggtggtgattagattatgggggcagttcccccatgctgttctcgtgatagtgagtgacttctcacaagatctgatggttttaataagggggctcattctcattctcgctcctgctgcactgtgaagagggaccttccaccatgattgtaagtttcctgaggcctccccagccatacagaaatgtgagtcaattaaacctctttcctttataaattactcagtcttgggtattcttcatagcagtgtgagaatggactaatatacaacatcataaccaggatataacttaaattgtgtaaaagaaataagcaggatcacctccttatgtgggtactatgctcacaacctgggtgacaggttcaatcacaccccaaacctcagcatcacgcagtatacctctgtaacaaacctgcagatgtacctcgggttctaaagtaaaagttgaaaatttaaaaaaaaggcagatgagagaacagctgttgcaaagagtatcagttgaaaccaaatttctctctaagccagaagaatagtgggtatgtgagcatgtgcaagattttgcactgcaaaagatcatttcaggagtccagaacacttgagaatatgcagaataacagtggagaattcaaagtgataccgaaatgcaaaagcacactaggtcaggatttatgagatagattctatttttgcctcacttctactactgcctaactttgtgaccttggacaagtcatgtattgttcttgggaatacaattttcttctctttcaagtggcaatcagagcacctgtttccacattgctatgtgggggtcaagtgcaatgtgaatgctggaaaagtgctttgaaaatgagaaggcactgcgtatgtgtaaggactgctaaaatggccttttccaagatgcattcacatcagtgacgccaagaagttggaaaggacaccaattattagatgtttctgacactgccttaacttcagggcatgtgcaagttttcctgatgtgcatgtgaaactgtgtctattacatatgctgaagttttcccccaaatgggaccagcacccacatgtctgatatattccttaggtagagccattcttctcaataaaacacaaaatagtgaaatacagaaatgtctgatttgtaaagagagggtatctgtaacaaaattgaaagtcacagatttgatatctacttttacattcttgtatccagtaacatttttttgagcatctgctactgagtgaagcatggaaggatacacaaagatgaataaaacacagtctttattgtcaaggagatgacagtctagaagaatggataagatgtgtctaaaagtaacttgaatgcaaagccatatgtggaaactataagacaaaaattaacgcaatggagttagatagggggaaaaataaacacttgtctctcggaaaccttcctgagaaaagtggtgtttgaagtgagcattaagaatagattaagtcatgtcatagaatcaggaaaatacaaggcatttctggaatgatgtggtggcctgtttggctgggagacagcttatgtttggggcactagtgtgatatggaagaggaggctaaagaaggttaattgaagacaggaccatggaaggttttccatgctagcctttctaggctggaaatggaaaaccactggaggtttctgagcagaagcgtcgtatgactcaaagtgtgtcagcggaagaggactttggcagctctgttgagtatgcactaatgttgggacagaccagtggtaggaaggccaattaaaaactaaatgcaatgatttaggggagagaaaatgaggatttcaactagtgtagtagattataggtttggacagatatgaatgaatataaataacattgtatcaaaaaattggctggaccttaaaaccatctggatgtgggaggtgagaaagaagaaagtaccaaggatgactctcaaattcccagccaaagtaaaaagccctgaaagagtgcatgggtgaaagatagtggatgtatttttaagacatgctgacttagtggtgctagtggaacagctaacattattatttcttctatacggcacacatttaccatatgttattctatttaataatcaaaacaggcttgtgagaagagtaagatcataccagttttacatagagggattaaggctaaagagaagtaacttgcttaaggtggcagaatcaccattggagaagaaacataaatattgtgttctttgtatgccatcattgcaaaaatctagcagattgttgaacataagaaactgaaattcttggctgggcgcggtggctcatgcctgtaatcccagcactttgggaggccgaggcggacggatcacgaggtcaggagtttgagaccagcctggccaatatggtgaaaccccgtctctaataaaaatacaaaaattagctgggcatggtggcgtatcctgtagtcccagttatttgggaagctgaggcaggagaattgcttgaacccaggaggcggaggttgcagtgagctgagatcgcgccactgactccagcctggatgacaagaacaagactctatctcaaaaaaaaaaaaaaaaaaaaaaaaagaaagaaactgaaatttgtgatttcctggtccagtgatcatttctaattgataccaatgaatccctctgatgaatatttcactggtatttttctaatatatgatacattcataagttggttcctaagctgtattttaagagaacatcatgatttagatttttcttatactaccaagaatgccactctgattctttatggaaactgagaccatacacttaagctctaggggggaggtaatgtaatgcaacctgtgtttctaaagcacaatcacactataaacagaccttgctgcaaaaataagtatattcagcacagagctgataaacctcagatctgtggctgaaatgatcagttgatgatattatagtaaacaccattaccaatgttgtgttctggatgtttttcttcaagctgtgtgtctgtaggaaatgactagtatcataaaccctcttgacaaaaaaaaaaaaatcacatttctgttttccaaaaagagttttttttaatatcataataaatgagttcttttgaattcatctgtgcttttctaaatattatcttctggcaatgactttgccttatctctgctctgctgtttctggagagcataattttgctacatgtatctgaagatttataattgcgcctcttaattggaaatcaaggcttggcattagttaacagttactggtgaaatggcccactgataaaaacaaatgcttacatttctagaataataacaggaattcttctctgaagaacccagagtggcagactatcacttcacaaaactttctcatttccccaaacttgtaataaagccagctcattgtttcttcaggctactaagcatcaagcaatttgttttctgtgttcagtctgtcatcttacggctcgctctaatgttcactgaagccctacggcagactttgggactactgtttttttaaataaacaattatggcattttcagatatggatattatcaaaggaatgatctaattgtccaccacagatttggatcagatagttattcctcataatacctcaagctgagactcaggaaactagtcctgcgtggggacatatgtcaaatgcattacaaaagcatcacctccttagtctaaataacgtcaccaccacccacccagttatgcaagcaaggaacttagacagtatcctttttacctccctcttcctcattgcccatatctaacccgttctatgttctgaaatagtacttctggattcattctgtcctgttgtatttttggatccatccatttttctctttctcaactaccccacttgtcagtccaccttgacattccacagtggcctcctcactgttctctccatccttcattcatgctcctctccagtgttttctccacctacattgagagcaatgtttccagattaactagtatatcaagtgagtcctaggtttaaaaacctgcaatcactttcattgcttttagtataaatatcaaaatccttatgcaggaccttgaaggctctacatgctctagccccactcacttctacagaccatttgttctaagtctcctcttctctgggaggaagagatcccctctactgagaatgcttctcttctcccatctcttcccttagttatacttttcctccaccttcatatctcaagtgctagttcctcagagaagccttcctcaccacccacacactcctggtccagggacctcccttcctaccttcctccctcccttcctccctttcttcctcccttcccttcttccttccttttctttttttccattctctccttctttctttctctctttctctttttttcctttctcaccattagctttctttcttcccattttctttccttccttccttccttccttccctccctcccctcttcctctttttcacccttccttccttctttcattttttctttctttctttgtttttctttcgtcttccttccttccatcattttttctttctctttgtttctttctttcttttgtctctctccttctttccttccttcctcccttcccttcccttcccctccctccccttctttctttccttccttttcttctttcatcctgttttcattaatttgttctttctttccatcatctatctttctatccttccttcctttcttacttcctccctccctccctctctctctttcttttcttctttctttttcttctattatctactatctatgtttttgtctattatctatccatctattcatctatctgtctatctctatatgtatatattcaatagaaccaaatctctgtatttcagatcacttatttctacttataatcttatatttattcatatctacagtcttaactctaggctgtaagctccgtgagaacagtggttgtatttggtattacttaattttatgttctcaagcctaactttgtgtctgacacaggtgagctttcaataaatattagtagaataagttaaagtgctttactgagctctgaatgttgatcaagaagtaaccactgcgaaatattggatgccaagaaaataagctatttaacatttcccagcaaatgattttcagtgaagcagtgaggatgggaaagacacaatccctgaagactgaaagaaatttaaaaagaaaatgggaaggcaaatgaaaagcacataaaacaaatacctaatacatgcagggcttaaaacctagatgatgggttgataggtgcagcaaaccaccatggcacatgtatacctatgtaacaagcctgcatgttctgcacatgtatcctagaacttaaagtaaaattttaaagaagaataaccagaaaataaataaataaatatatatttttttaaaacctgctttgtcaggtactgttacagttgatatagatgaagtgaaatctaagaagaatgtctaggcccaagatgcctagtgcttgcttttaactattttcattttttagccaattactaattaacagaggactagttcaggactcattggaatgtccaggtggctaagggactgcacagtgtttgcttttgattacaaaaacaagccctagctcatgcacttcctgataagtttggttctgtgtccccacccaaatctcaccttgaattgtaatgatccccatgtgttgagggcaggaccaggtggagataaatgaatcatgggggcagtttccctcatgttgttctcgtgatagcgaacgaattctcatgaggtctatgtttttgtttttgttttttgagacagagtctcccctgtcacccaggctggagtgcagtggtgcaatctcggctcactgcaacttctgcttcctgggctcaagtgtagctgggactacaggtgtgaatcaccaatgcctggctaacttttgtatttttgtagagacaaggttttgccatgttgcccaggctggtgtcaaactcctgagctcaaagcaatctgcctgcatggacctcccaaagtgctgagattacaggcatgagccaccacacccgcggagatctgatggttttataaggtgcatccccctacctttggcactcattctttctcctgctgccctgtgaagaggtgacttctgccatgattgtaagtttcctgaggcctttggctggattttggacttgcatggggcctgtagccccttcattttggccaatttctcccacttggaacaggtatatttaccccatgcctgtacccctattgtatgtaggaagtaagtaacttgcttttgactttacaggctcatacgtggaagggacttgccttatttcagatgagagtttggacttggacttttgggttaatgctggaatgagttaagactttgggggactgttggaagggtatgattgtgttttgaaatgtgaggacatgagattttggaggggccagggatagagtaatatggtttagctctgtgttccccccacccaaatctcaccatgaattgtaataatccccatgtgtcaaggacaggaccaggtggatataattgaatcataggggtggcttcccccgtgttgttctcacggtagtgagtgagttctcatgagatctgatggtcatataaagggcttcccccttccctcggctctcattctctcttctgtcaccctgtgaagaggtgccttccaccatgattgtaagtttcctgaggcctccccagccatgcagaactgtcagtcaattaagcctcttttctttataaattgcccgatctcaggtatttcttcatagcagcataagaatggacttacatacttccccaagacctcttcattgctgggccatcacagtaccctgaatatgttcttaaaatcaaactttaaaccagttagttgcttttaagctttttctatggtgtcttgtgcaccttacatcaaattcaccatgtataatgaattaaaaagtataactcctagcaacaactcctaaagagtttggagacttcttctggtggcatctctcttgctcttgtaccctctctctctttttctctattcctctccccaagtgtctgaataataaaatttctatcaggagtggattaaaagatacatctatcagttcaccaatttagattctataacaggaatgacaggcattaagacattgtatccaataatgtctgggctaacttttttgttgtcgttctcacatcctttccactgattaacacaaataattgaattaagtataatttcataagacatgaatgactgcatttcatcataaatcactcataaattcttttgctaaattgttggttttcaatttaggataactgaaggataggaattttaccttcaggttagctataaccaaaaatatgaggaaaaaaaacatgatctctgccagaagatcactggaagagatttagtgtgagatcttccatggaaagatcagagcaatacagactggctcaaagagagcacatagcctcagacttttattctaatgtataagaaatggtttttatgtactttgtgttcattgatacttattttctttcttggcttcagccaaaatatgaatgtaccctcagctttcctttttcatggcaatcattgattctaaaggcctggcacagatatgttcttcgaagggtgtgacctttaccgtcctgtgcgcatcagctatctccccatcccatacctgcatccctttaccagagggctttctctggtagactgtccttttgcatgctggagagtgagctcttccagaggcagccctcaaaccatgatctatgggagctgacagatcctcagttgtgtcatcccttaggtgacaaactgcaccatccctggagcatctcatggtgaagtcctggttcccacagtggtagcttgctcaacagtgcagcccttattggctcttttccatcctctttcttgctttcccactcttctacccgtattttctctgatcacctcccaaataaactatttctctagaactcttgtctcaggcttaaattttttctgcaaaagggaatgcctttggatttctgtaaaagggtctgcttcaaggagaaatgcaacctgagagagaaggtcatggttttcacaaaaggctgtggttacaatgagatttgaggcttaaatccaggcttgtgtaagactgttatgtgttactagttgttaaaatattgagtgcttttatgcttgtttgcaaatagctacttctcccaactctgcagtggtcatgaccacttcatggtcatccattccttcccatgattcaacaactaaagtttattacttgccacaacaggggcttctaagaccctcattaaatgctatgggcaccaactgtttgaatgattggtgtgcttgctatgtgaattattaaatattttaaatattatttatgtttaatgtggtgcccaccagacccagatgtaacgtacagcttttccttggacagtatagagaagaccttgaagttatgttcttttaactcagtctttagtatttctctgcatgaaatccttcagctccatgtccagttgcaccgtggtagatttgcagggaagtggatggatgaaagagacaggagaaggaagagaggacagaacaatcaatacttgatgatgaacttctgggaaactgcgagcatttccatttgaaacaaatagagtgtttcttatacaatagccatatgtatttgtaaacaataaaatgcctgctagtgtacaatggattgcacttctctgatattatacttatattcttggctctgctttttttctggattcaaaatattcataagaaatgaaatatggaaccaaaagtcacacatacatacacacacagatacattttatagtagatacttgctgcttggcccagatatgttttgtggattaaattctaggccccatgctggatgccagactcactacccatgtttagacccctagacatcagacatttactgcctggccctgtgctcccagctgcccatccaggtggtaagttttatatctcgaaaagctttttcaggctgatttcatggtgaatatgtgttaatcacctcagggagttattgagaatttgggataaacttgattgggtgaacaagcagcatgtgtccaaatatagctattcctgagctgtatctttgatatatttgatgatgcttgaaaacagtccgatttacatccatcgctgcattataaagaacagggctgaagatttataagttgaattttgttgcaaatgccaaagcatgggccacagataaatcagttaccagaataagggtgattttataacctgcatgtgttttatagtttctcatgacacaataatcataaaattcaaaaggcacactcttgcaagtgtgaaaaggcaatttcagggttccttttggtttctgctattgcaaggcaggatatagatacagtttctcactatttagatttgctattgaagttttagtggagtgccaaagatttcagtcagcaagtgtcagtaaatgatatcaacacagctccaagttcaaggtggaatcgtttcttgaaataaagtgagcatttggtgcccagaaatcttgttttaaaatacaccaacttctcagttttggaagagctctttattttttaaaaatagattcttattatgtaagcatacaacttttcttgtatgttcctgttgctcgtatttgtacacatacacagtgaaagttatttttaaatcttttattcttatctgtaactgctgacagcatttgaggtgtggaaacttttaagactgaaaaatcaagtaaaggaaaattcaagcaaatgaatacagaaaaacattatcattaggagccttaataaaactgctgtttagcttgtcacgctggcacattcctgtaatcctagcactttgggaggctgaggcgggtggatcacttgaaatcaggggttcaagaccatcctagccaacgtggtgaaaccctgtctctactaaaaatcaaaacaattagctgggcatggtggtacatgcctgtagtcccagctacttgggaggctgaggcagaataatcatttgaacctagcaagcagaggttgcagtgagccgagattgcactactgttctccagcctgggcaacagagcaagactccatctcaaaaacaacagcaaaactgctgtttaactccacaaaagtcattacaccactatacattcactaaaattgctaaaattaaggaaaaaaaaaaaacagtagtaaggccaggtgttggcaagattgtagaatagctgaaactctcatacaggggtgatataaaatggtacaactactttggaaaactctctggcagtttctaataaagttaaatatgtacttacctctcctatggcctaacaattccattcctaggtatttacccaaaagagatgaaacatatatccatataacaacttgtaaaagaatgcttatagcccctttattcataaaaaccccaaactggaaacaacccaaatttccaccaactggtaaatgaataaacacattgcggtataatcacataatggaatactactcagctataaataaaaatgaattgctaatgcattcagtctagtgatgaatctcaaaattatagtgtttttgaagagagctgaagagacacaaaatggaccatactctacacttccatttatattaagtttaaagacaaggaaatattctgcagtgatagaaaccagaatagtagctgattgtagagtacaagaggactgattggaaaggagaacattccagagagaggaagtgtattataccttagcctggatgatgattgcatggtcatatacacttgccaaattgcattgatccatatgtttatgatttgcattatttgtatataaattatacctcaataaaatgctgttaacataaaaaaattgcccagcttctgagttcttgcttaataatattagtatcacctgttgctgttctacgttaactcaggagctaaattcaaattcagtgtatgacaaaatcttatttgtgtgaaattactgggacgtgtacttttgcatttaagaaaatgctccaaaaaactgaagattctcccttcatgttagaaacttaaaaataaaataaaataaaataaagatttttttgggaggaagggaatcttaagttaaaatgtcacaaatctctcctatcatgttagtcacttttttcttgacttggcatttgcttggttgccttaagcctttgtctatttttcagagttctgacagagttgagtttgataatttttgctggttttatcagtgttttcgtggagaaatgggcccttggggctccctactctgctgtttttgctgacttcaccaccaaccctcatattcttaactctgtatccttaatagggttgaatgggtttcaaaaggcaaggtaggcaatggatcatgatactaagtcaatgataggagctttgaagtgaaagaggtgtttctaacaaaaagtagatacacactctccacctacactcctcttcctccatcatatcatacaattcagaagcaagaagaaaacacaaactcatagactgaggccatccaccactacctgaaatgctgcacctcactcaacatgggatggggcttcgattgttatgatttaagcacttctgaaaacacactttctacttcctgtttggtcttaagtcttccctggaaaggtcatctatctccatgtatttcctataaatatctacctctcttattaagtgttacattcaaatgtgacaaattaaaatcaagtggaaatattttgtgttaatgataaggtaaagccaactgtgtatgtcagagtagaatatggcatgtgctcttatcataaatattacaggagctatttgtttgtcagggcttcatcaaaacatctgaaaattgcttgacttggaggagaatagactataatttccatgtctgccccaaataatcagtcattgacaacttagaaaattcttatcaataaagatggaatcaattttttctattccacaaaatgtaagcatatcattttgagacaaattttaaaatcgttttagacttgacaaattacatgaaagagacacttagtcagaaatgattttttttaatgaagtgaaatttaataagtgactctgaatgtctgttgatgtgttgggaagcccatctttgcttgaccaaagatttatccagtaataatcaaaacatctaagttagtcttagaatttatatatatttcccatcctggctaacaccctcctcagcatggcagcagtaggaaagatggcggccacattctctctatgggtacctgattctggaaggagcagagcagaccttattaccaaagaattgtgtttgtctgttttgacctgaagagtccctaaaagtacttgccttcgttttacctaacttggaactctcttagggcagaaaagcagccatgtagaggacattcctccaaaacatagaaaggtaaatgaacaagcctctgccacttagggcaaaagatgatagttgttataaacaatagacaaccctaaatactggaaggaaaagctggagaatgagttactttagagaataattgctttgaaaaagattccttataatagaaaacctaaaaagtgatgcatatgcccaggataggacctatgctcaaaagatttgagaagacactaagctttcaccttcagcttgagatcttaaggcttcacaacagcaggaaatgaaggctaaggcagagttgtaaacagccaggctaggagagggttgggtgtgtgtgtgtgtgtgtgtgtgtgtgtgtgtgtgtgtgtgtgtgtttgctctaggcatttagggaaatctgccaaaccactagctaaccacaagctaacaaaatagagacttcagagtccatacaacaaaatttatagcctttaaaaatagtccggaaaaatgagcaaagtgtttgaatagacatttatccaaagagatatttaaatggaaataaacacatgaaaagatgcataacatcagtaatccctcaggaaatgtgaatcaaaaccacaatgagataccacttgacaccatttggatagctattattgataataaataaataaaataaataaataaataaataaataaataaaataaataaaaaaaataataaaaatggaaataaaacaagtgttggtgaagatgagggaaactgtaacccatgtatgttcctagtgatgataggaaatggtgcagccactgtagaaaatggtattgtattttttcaaaaataaacatagagttaccatataattcagcaagttcacttccgggtatatatctcagacaattaaaatcagggactgaaacaggcatttgtacactcatattcatagcagcattattcacaatagacaaaaggtgaaaacaacccaaatatccatcagtggagaaatagataaacaaaatgtggtatatacttacaatggaatatgattcagccttcaaaaataaagaaattctgacacatgttagaacatggataaatcttgaagacatgctaagtgaaatatgccagaaacaaaaggacagatatttgtatgattccactcgtatgagataactagaggagtcaaatttatagaggcagagtggcagttgccaggggatcatcagagagaagtataagtagttattgtttagtgagtacagagtttcagctttggaagatattaaaaagttctgaagatggatggtggttggtgatgattgcacaacacaacattttgaatttagttaatgtcactcaactgtacacaaaatgactaaaacagtaaagttgggctatctatattttatcacaataaaaaatagtttagaaaagtcactaaagaaagaaacaactccaacccacagcaagcagcaaaaataaaccccaagcagtggcaagaatctggtttctggagttaccacataataatattcaaaatgtcttgttctcaacaaaaaattatgagtcatgagaagaaacaaaagagtatcccactcacaggaaaaaaatgaacaactctccttgaaaaagcacagatattggatctactaactaagactttaaatcaactcttacaaaacgggtgattaccagagcctgggaaggataatgggtagggaggtggagggggaagtagtgaggcttaatgagtacaaaaacataggaaaaatgaataagatctagtatatgttagcacaagagggtgattatagtcaaaaataatttaattacacattttaaaatagctaaaagcatatcattggattgtttgaagccaaaggataaattattgagatgataaatatcccatttaccttgatgtgattattatgcattgcatgcctgtatcaaaatatctcatataatacataaatatatacacctactatgtatccacaaaataaagaattaaataaataaatataaatgaatcaactgttatatatactcaaaaagataaatgaaaccatggacaaagaactgaaggataaaaaaagaataaagaaaaatgaacagaacccaagagacctgtgagacaccatcaagcataacaatgtaaggggagtctcaggaagtgaggagagagaaaaaaaggcagaaagaatatttgaagacataatggttgtaaaactctcaaagttgataaaaggcataaatctacacattcaggaagcttgatgaactccaggtaggataaatacaaagacagccacactaagagaaattgtaatcaaactgttgaaagctctagacaaagaatcttgaaattagcaagagagttgcaattaatcacatacaaatgatcttcaatgaaattaataactgatttcttatcagaaacaatggaggcaagatagcaattggtatatttaaaatgccaaaacaggaggaaaaaacaacctgtcaaccaagaattgtatacctggcaaaattaagaaaaaagtaaatttaagaaaaaagtaaaatatttccagataaaagctgatagagtttttcacaagtagacctgtcctacaagaaatggtaaggagatgccttcaggatgtaatgtcagcaaactcgatagtaacttaaaggtgtacaaaagaaataaaacacactactaaaagtaaatacatagtcctataaaaaggcctattttattgtattattggcttgtaacccctcttttttctcatatgatttaaaagacagatatatcaaatgatgaataaaaatctatgttagtttagtttacatacaatgtataaagatatagtctgtgacaaaaacaatttaaagaaagagatatggagaatataagagcaaagtaattgtatactcttgaagttaagttggtgttaaatcaagccagattataagtttaagatgttagttgtaatccccaggataactactaaaatattaactataaaatatacagaaaaagaaatgaaaagtatacttcaaaaatcaaacacaaaagaaggcagtaatgggggaattgagaaacaggaaagataagacatatagaacacaaatagtaaaaatgtcaaaagtaaatcctttctcacccataattacttttaaatgtaaatgagctaaactctccaattaaaaacagagattgtcagattaaaaaacaacaagaagattcaagtctatgctgtttacaacacattcactttagctccaaagatacaaacaggttgaaagtgacggaatgtaaaaagagatttcattcaaattctaaaagagaactagaatagctatactaatatcagtcaaaatagaccttaggtcacacatgctacaagaggcagaggacattatgtattgataaatggggcaattcatcaagaatataaaacaattgaaaacatatatgcacctaagagcttaaggtttgatatagaaaagggaatgagcctaggtcggtcttgtactaattcagtttaatttacctctctgagtttcattgtgtataactctgcaaatcctctttttttataacatagaaattccttcctacctttctttcttccttccttcttttaggaggcaagttttgagtacctacttttgacaagccctgtgctaagttctggagatacacatctcagtaattatagcccctgtaattgtagactttatagtccaagtcagtagctttcaaattttagtttatatgagaatcccctgggaggctgatagaaaatacaaactactgagcctcacccaatgtgtctgattcagtaggcctggagtgaggccctaagacctgcatttctaacaaacttccaggagatgctcatgctgctggtttgtggaccgaactttgagaactacccgtctaagtcatggattctccattttggctgtacattgacatcacctgtgagctttaagaataccaaggcctaggtctcatcttcagacttaaattgcttgggagttgcctggtcatctggattttttttaagcttctcacatgtttctaatacagaactaaagctgagaaccacttctcatttctggctgcttattacaaccacttggaaaggttttaaaaaaaaatactgatgtctagaaagcattatggattaatgcaatcagaatctctgagaattgagccccagcactagtattgttgaaaaacgtctagtgttgttcaactaatttgaaagtttaaccagagctgaactccatctaagcaaaggtaacatacaatgagtgaaggagagaggtaattttaaatgtcatctttttttgtttgtccttttaaattatcaagaagcagacaggaacataaatggaaaaccaagtctcccataacctaccactatagtatgtctattataatcatacatttttcctatccagtctttgaccatatgtgtgtatttttatatggatcatatatgtgtaatttgagattctgccaaaaaatttctttaagccacagaataaccttttaaaaataataagtaaaatgggtggcattgtcggattttctccatgttcactgaggaaagataacaagaataaacttgatctcagcaggataatttaggcttgtaactggaaggaccttcctagtcagcagaattaaactgctcaaggagaaaaagtggtgataaactaggatatggaacgaggaatcaaagtcctatctagaagccagatgatgggaaaatggccacagagagatgatctgggacttggcagggactgttccaggtagaatgctgaagaccgttagtggagagaatttgtctcttcatctgtatttcacttagaatctcctgtgtgtggttcaacattttgtggtggtttgtggatacactttctagtctaaaggaatagaactagattaatattttctattgtaaaatttagtatctttaacttagaacataatataattatgaaccgtataactaagttttgcaactcatgcagggggattatagataaccctagagcactcattctttatctgttctaagatagtcgggatatgagcagttgaagacattcctcttagttaatccaagtgggtgccaagacccatgcactggagagttgaaacaaaatacaatgagtctgaaatttcaagcagaagttcaagcgtctctttctattctgtcttgatacattgcattgaaagaactgctatggtttaattctatcagtgaaaataacagggtttgtgatgtttttaatttatttttccctccccacattaactttcctcatttgtgtttggtaaatttgcttcaactgctcaatttgcatgaggattaaatttcattaacagatgcaattagaaagtggaatttatagaataagtcttctttataccctaacctaattgacataaggattaccgatgtaattgactagaaatcctttcaagatagtcaagctgacatttaatagtgtttttctctataaaattaagaatgttcactacaatctacatataagaactaataagcctattccctccacccatcacctaaaattatagagctaggtcaattttatattcttgcagcaaaaaactcccctggcatgaggttgaacaaagtctagttaagcttgctatttttttccttttagtagaccctcccttgagtaaaaaaagatagagaagagcaaagggtcttcgctaagtgaactcatagcttagccaaagtctttcagagctgagtacggaggggctgcctcagtgggaagcagaaattaagacctgctcctccatacatcctacttgcatctttagcctcgtttctttacagcagttgtttgcaaccttggctgtacattgaaatcacctggagcaccttaaaaattgtaatgacaagaccccactgtaggattctaatatacttgggctgagatgcagtccacactatgtgagtgtgaaaagctgctcagcggtcctaatgtttggtcgtggttaagagctgctgctttacagtaagcagtactttgcctgtggccaggtaaggcaaaaatgtgcctggggactttgggaaaaagaagcaggttctctcagtaaaagctgtgctccggcagaaagccggttaagtgttccttgctgcctatttaagaagtaacagtgccaaggcaatcccatttgctctggccatgtgataattaacaattgatatttgtgtgaagccagcctgcctaacagaatggtgtgcagtctttcagccaaacagtacactggcgctcctctgtggacttaaaattgcattctaaaaaagtagatggcatttttaataagcaaaaccccagtttaaatataaccaactgaaattataagtaatttggtaatatgacttcatgtgggggtcatcttaacattaataatacctgaaatgaaataatttctaaaatatttctaatctcaaattactacctttggtgatattttgggtgatagactatttttacaaactagaaaagattctaaatcaggaaaagtacataactgaggtctggctttttgaagcacacactcactttttttatgaaatacctgtttgctgaccatggtgtaggccattaatgtcattacctctaccacttgaataaaagtgaatccttttgtagcttatagtgtgtaaacctatgagacttatagtatgtagatgtatgatactgacagccaaaacagtatgcatattatgataaatcactgggtaataaagtagccaatttggaaaattctcaattggagtagtccttgtgtgttggcaaataagacttgcatttatacagtgaacaaaaaagtttgcttaagaattaggagcaagtaattgattttttaaaaatgatgtggttctggtggaagtagtatagccctaccaagtagaaaaaaagcaatcaatttaattaaaaagtctcagctgaaaaaaaatttagttcccatctatagacaggggctctgtccttagatacagcaggaagattcaagaccccatcatctctctcctcccacttctcaacctcctcttggtgtgtttcattgtccaaactcaaaaggaagccaggaggtgaaggctggctgatgcggttcagagaagtttgtctcctggacacagtgcaatatggagaagctagaaagtaggtctgaaaacagagacaatttgactttttgcagatgacatgattgtatatttagaaaactctattgtctcagccccaaatcttcttaagctgataagcaacttcagcatagtctcaggatacaaaatcaatgtgcaaaaatcacaagcattcctatacaccaataataggcaaacagagagccaaatcatagtgaactcccattcataattgctaaaaagagaataaaatacctaggaatacaacttacaagggatgtgaaggaccccttcaaggagaactacaaaccactgctcaaggaaataagagaggacataaacaaatggaaaaacatcccatgctcatggataggaagaatcaatattgtgaaaatggccatactgcccaaagtaatttttagattcaatgctatccccatcaagctaccattgactttcttcacagaattagaaaaatttactttaaatttcatatggaaccaaaaaagagcccacgtagccaagacaatcctaagcaaaaagaacaaagctggagacatcacactacctgacttcaaactatactacaaggctacagtaaccaaacagtgtggtactggtaccaaaacagatatatagaccaatggaacagaacagaggcctcagaaataacaccacacatctacatctttgacaaaccttacaaaaacaagcaatagggaaaggattccctagttaataaatggtgttgggaaaactggctagccatatgcagaaaactgaaactggatcccttccttacaccttatacaaatttaactcaagatggattaaagacttaaatgtaagctctaaaaccataaaaaccctagaagaaaacctaggcaataccattcaggacataggcatgggcaaagacttcatggctaaaacaccaaaagcaatggcaatagaagccaaaattgacaaatgggacctaattaaactaaagaccttctgcacagcaaaagaaactaccatcagagtgaacagacaacctacagaatgggagaaaatttttgcagtgtatccacctgacaaagggctaatattcagaatctacaaagagcttaagcaaatttacaagaaaaaaacaaacaaccccatcaaaaagtgggcgatggatatgaacagacacttctcaaaagaagacatttatgcagccaacatacatatgaaaaaaaagctcatcatcactggtcattagtgaaatgcaaataaaaaccacaatgagataccatctaacaccagttggaatggcaatcattaacaaatcaggaaacaacagatgctggagaagatgtggacaaataggaacaattttacactgttggtgggagtgtaaattagttcaaccattgtggaagacagtgtggtaattcctcaaggatctagaaccagaaataccatttgacccagcaatcccattactgggtatatacgcaaaggattataaatcattctactataaagacacatgcacatgtatgtttattacggcagtgttcacaatagcaaagacttggaaccaacccaaatgcccatcaatgatagactggataaagaaaatgtggcacatatataccatgaaatactatgcagccataaaaaaggatgagttcatgtcctttgcagggacatggatgaagctggaagccgtcattctcagcaaactaacacaagaacagaaaaccaaacaccacatgttctcactcataagtgggagttgaacaatgagaacacacggacacaggaaggggaacatcacacactggggcctgtcagtggttggggggttagggcatggatatcattaggagaaatacctcatgtagatgacatgttgatgggtgcagcaaaccaccatggcacgtgtatacctatgtaacaaacctgcacattctgcgcatgtacttaaagtataataaaaacttaaagtataataaactttattatactttaaatataataaagtattatataataaagaacttaaagtataataaaaaataaaaaaaagaaagtgggtctgaataggcaaacagaaatatatggtatatctgtttaaccaacagctttcctctcctttctctggaaatgtaaccagctagaagactggagtagccatgtgactaattctgactaatgtggtgtaagtaaaagtggcaaggtaggactttaaggaagattttttttctcaagaggatatagaccccagaacctgtgttttgtcctcagtcatttcctccttcatgatacctgcaaaacggaggtgaagattgaggttccaactgccattttggactggatttaggcaaatttgcatttggatgtcattgctaaggatgggagagcagaaatttacaagaagtgtgtgcactagtgactaaagccaccacagcagcgctggattcctcttctgaatttattccctgtgaaggaaaattaatcattatatattaaaaaaatcaacagttcaaaagtttcatctcattatgtatttgctatcaattatataattaaagtatgatgtaggaatttttaaatcatcgcttttaaattttaaaaattagttctaagaccccaaactatgtgcaattttacaaagtatatttgactgccttacaacaggctactatctacttaggtattgtgcttacttcagatgaaaattgtgccttatcaacaggtggaaacaatcattaaatattaaaaatatttgcttaatgtagcaagtgaatgggtggacgaatcatctcagtttctatcgggttttcagcatgtgaacctagtgtttaccttgtcaaaaagttgattgtttctaataagcaggataacagatattctagcaccttcaaagtcgaacagagctgagaaatgaagtgtgacttatcctgtggaatgtaaaaaacaacattttttaggaagcatgtgaatatgaatgagaggatgatcatcatttaaatatcaccaaataaacataacatttctgttgggcatcttttgagcagttagattttccatggaatatgttccagctttgttttgcttggttggtaatcatagcactgaatttaataaatagatattattgaatttccttggaatgttcctggtgttgtaacataaatttagtgcttaactggctatgatatatggctacatatctatagtacttacaggtggtgaagtctgttttaggttttctgcacttcggttacttagcttgagctatcttgagattataaatcacttctttttttttttttttcaaactacacattcatgacatacagcatcaacagaagatgatttattctgtgaccctactggcaaaagaatatattgatactataattttgctaggtgtcatttgttcttgagggttccttgtgttggtatgcaatagcaaattaatccagaattgcaaggtagaaggaaatataacagaactcgtaattctgatcctgagtcagttagctgaataacttgatcagatcacatctaatttttctcaatgagagcactactggcatctcaggccattgtgtgatattggcctgggcactggcctcacaaacactgcaaagcagtagcactttcagccagttaaaatgtcacggacttctgcagcagcctcttgatttgtgtgttccagaacttgagctccagggacgatgggccaagtttgggagcaagtactagagttttaacttaaagttaaaagcggaggggtgctaaaatgttgactctgatacaggtctgtggcaatttaattccatttccccctctgtcttgaaccccttctacttgaccactaacagtttttagcctaaattatccggatacccaagtcttcacttcattctcccctgtggacaacccaatgcctgggaacatgatgttcataagtttagtattctccaatacatcaagatcttgatggaaaatctctctaaaatagtaatgggaaaaatcttccctccaaaattccaattattttgagtgaacatcatcatgcatataaaaccaatgtcactggcatgcatcagaaactttaatttaacataggttagcaataatcattagtagtcgaaacttcattgctgatcagtagtgggatggtgcctgtgaatagccactgcactctagcctgggcaacatagcaagactccaactctaaaacacataaataaataaatactttaaaaaaatcattagtaggtggtatgttccttctctacttaaaagcaaccaatgttgaaatgtccatttgaagttgttaaaaatttttaaagacatgacttagaaattgcgacttagcaactaaagctgtgactttgaagtcaatttatactttaaagggaatctattatcagttaagttttcagatctcataaccaaattggaaatctgaagaagtcagaagttctaaaatgcagtgttttgaaaggacattgatatatagttgtgatattgtcttagcaacacatttttctttaaaagaagaatttcttcttgtattatcaatccttaaaatgggtcatgtattcttggaaaacagggtattcatgcaatctttaaaacaccgtctaaacttcaagtgaacttcaaacagcccaaaccaaatatatgctggataaagtgtattgtggttactggaaaactttaaaatatgaaacattcctattgctgttggtattttacctctgagaattttctagccaaagttctatttgaacagaggtcaaaaatcagttactgcgtgggcttttcttaagggatgaatttaatgaaagggcctagttattgcaacatatgctgccttcatttcaaaagatttccttaaagcataatgattaaagcctgtggagaaaaaaatttgtacttttcaaaagctccatgaagtaccccacagaaggaaaaacaaagttctgaatccacatatagaatgaataaatattccttttagcttaaaagtcataaaaatcattagttatttttgctcccttttattgaaagtgttttaagagttttaaaagaccagtgtacactgtatcaaatattcctgcttatttccaaagaaaagtgaactgctttattttgaatttttttttttctttacacagagtagggaagaattcaaatgttcagcaagtattcttaagcacctaagtcattgcactaaagtaaatctcatttgatggctctcttaaggtggattctctagaaccaaagactgagagacacttttgggtacaaagagtttatctggaaggtgatgtcaacaagcaccagtacagcggggagaaatagagagaaggaaaggcagcaaggcagccaatatggtgtgagttaacaagcaggttactattgtggacaactggaagctaatcccactggagtattggggatgagaggttataacacagatcttactgttatcccacatgaggggcaagggagcagaggtagttatccaccaacaggttttgattgatggatgcatctggtttgtaagggagctctcccttgaaatgctctttcattcaaccactgctgctcatcccatacttgggcctactggacaccagcaagagtgcctttaggcagaaagcttcagttgtttgcctcgaaagtcatcgtaggaatgatgggaactcagaaaatattgccaggacactgactacatctgccacggtgaaaagctgtctctaaaatccaactacaaagtaaacaagtatttccccaaaagataaatgttaatagtaaaatacatatcagaaattatccaaactgtctagtaatcagaaattaaaacaggattaatccaaattgaggggtatttaattatcaaatttttataaaactgtgataaagcctaatatggcagggtactgttggtactaagaatattatttttaaaagccacttggcattgtgtttcaataggtaaatcaatgttcacatacactgacctaatgattaaatttctaggatataagtatgaaagaaacgaaataaaacttgaagagagtgacaatatcctatgtgtccacaaaaatagggaaatgattaagtagattatagtgtatgcaatcactgatatttttataatcaataagattagggttgttaaggtaagtattagcatgaaaataaatgcttatactgtaacaataagtagaaaaatgatgcacaaaagtatacatgcattccagttgcagctatcttatttttcaacagcattaaaaactactggaaggaaatacatccaaaaggctaatagtgattaaaatttactaccagtgtcaattacaatgttttatttgcaaggaacagaaaatccaactctcactggcttgagcaatgaaatatatttcttcatgtaactgtgtaactagaaagcccaagggttgggcttcaggtttgaaccagccagcagctcaaccaggtcattaaaggtctggttgtttctcttcactcttccttaatgtttgcttcatgccaaagcaggctgtcctcttggttgtcattttgatgccaacagaaactagaactagaaactagatgcttccatgctcacactgagggtcagaatgagggcttttatccctcaaccattgaacaaaatttcagaggtcatcttactatcagctacaagcctgtcggtgaacccaaaactgtggctgggggataagattggttgtaagcagatcagggcacccctctgcaacagtggtggagtcaattcccctctaagtctgtggcttccacccagtgaggaaggtagagagtgggtgaagaggagacaatgccaatatctacggtaatatatgaatatatataggtatatatgtcgtttttgcatgtgggtgcatatatgtaaagatacatatatacgaacacacccatcaacagaggaaacacaactgcacttaccacgctgattaatttttttatttactcattcagctgacacctactttgttccagacactatcttagagaccccagaaacaacaataaataagacagttaaggtccctgatctcacgcagctgacacctactttgttccagacactatcttagagaccccagaaacaacaataaataagacagttaaggtccctgatctcacggagctgaaatcccagtgaaggaagacaggcaataagcaaatgagttcatgatcaggaaaaatggtatgaagtaactaaagcaaggtgccagttggagtaaccaggtgtattttgttttcttttgagtggttagaggaggactctttgaggaggagacatttaagctgagatctgtatgaaaagaagagccatccaggcaaagatcaggggtctggagcacacagagaagaaagctcattagtacaaaagggctttaaagtcaaagtaatcctgggattttggagaaatcacaagtcctgtgaagcagagccatggtgtatgaaaagtggaatggaataaagagagtgtggaatggtatgtaggcaccaggtcatgtaaaactgtggagacaatggttggaatttgggtgtcatgcaaagagcaaggagactcatttgaatgtttttagtagaaaaagggaaatacctatttgtgttttttagaaatctgtttgggaggccaggcatggtggctcacgcctgtaatccctatcccagcactttgggaggctgggacagagggatgacttgaggtcaggagttcaagaccaacctagccaacatggtgacactccatctctaccaaaaagacaaaaattagatgggcgtggtgccacacacctgtgatcccagctactcgggaagctgaggcaggagaatcacttgaactcgggagacagaggctgcagtgagctgagatcatgccactgcattccagccggggtgaccaagtgagactccgtctcaaaaaaaaataataaataaaaaataaaggatctgtttgaggatggtttataagatggcttgtggagagacaacaggaaattcaggcctgtacttgtctaggcaagagatggtgacgacttgaactaaagagtaatagaggattgagaggaatggaaggcctgatgtatactgtgtggagataatgccctatgtcctactgatggagaaagtcatggaataaaggctaactcaattattttatgtgagcaactggtgggttgatgggctgtgaccaagatgaggaaaacgagggaagatttggaaagaaagggaagaactaagaacactttatggacatttaaagctcggggtgtctgttagtcattagggctgattacatatttgctggcacactccaaaagtgaaactgaggggcccttttccaaaaagcaatgggggaagtgccaataaagatactaaaatagaacacttttctttcttctgcaatctctctcttgactggtaatggtatttttttaaaaattactatttaatgtcattctaagtaaaaaaaaattaaaattgtttattacgagttttaacattcattcttacattgtgcaatgctattttcagcaaataaaatgccattttaatcatttaatttatatacagaatcacaaaaattatacaattcacatttcatagatagtacatgcctatgttttttgttcttatcaagatagaggaactactgtacaaaactagtatcattgtttttattttacttcttgatacatgaacaccctaccagccttctgtaccttcagcttacttatgagaaaggaaggactggaaagaaggggaactctgggttgttccatctttctcactttttctatgtcattatattcagtgtaatggttggctaatagaaataacacataatgattaggattattggtgtttcatgttttagaatgctatttctgcatttgaagcaagttctgattctaatggaaagcatgacttttcatagatgtgagaacctggagatgtaacacttttatcatgtagttggtttgagcctcattgaactctcattgtggatccatggacattctgtgcacccgagcattgcaaattcaatatgtgagcagggcagcaaagaacaatggacatgtatcttgcacatatctcctctgcttatgtgcattctccattgttcgatcagacttcagttacaaaacacaagctcaaagataaaatgatggagaatttcaggacaatgactgcagaacattaaactaagcatgggtccttctgagtactgggccctgtgtgactgcagaggcctcacactcatgaagctggccctgcattcatgtggaaatgtgtaaaaaatagatattgaagtcgggagagctggtgaaaggtcatttttggagatgtaggcttgggaattattagtatttatatatttaatatttagggcatagacagggtgagaccacctacagggagtgtgcagatgaagaaaatttctcagaaaagaatcctagacactccagtaacacaaaatgccgtggacctgaaaagtatattgagaaggaatggccagaaaagtaggaggatagcaggaaagtccaaaattctaaaacccattagaagacaatagttaaagtagagggatatgatcacttatcttgaaagctactgagatgtcaagcaagatgagaaaggaaatgtcattattggatttgccaacataggggtcattggtgaccttggtgaatacagcctctctagaaaaaggaggacaaacattcaagtgaatattcaggagataatgaatggtgagaaaggagacagcaatgttgacaactttttcaagaactttaactaggaaatggaacagagaaatggtgctgtgtttgccgaaggatggggtatcaagggaatgatgtcaatatgtttggcagtaattattttcaatgctgcatactattccattctctgaacctattgtaaactatatattcatgagtgtttagtatatacacatacctctgttttgcaaagcagtttgtcatgctactaccatcaacagggacaagaggtcccaattattcacattctaattcaaagtgtgagactctggccaaatgatccttctgacctctctgtaaaaagaccaagttctaaatgactttggctttcactttgatctctgttaatcaagatttactctgagctcccaaaggcataaagagctttttccttctggtttcttgcttctctccaagcaggactttggagtatcagtgggtgattacagtgatagtttccttcatggctttcaggccatgaacaaatgaaaacagaacaaaaggccaagaattccatgcttctgtaagtctgttatttcagggtaattacacatttacatttttgcagctagcagctgatggacattgtgcaaaagggaaaaaaagataaatgtagatttttttaaggttttctttatgactttgtttttaaagactactttgtgtttgaaacatacaaattagagctcaaaagtttccagcaattagtttacacagcaaaagagaaggaatcaaggccaaagaacaatcttatttaaaatgctgtggttggcctggcatagtggcttatgcctgtgatcccagcactttgggaggctgaggcaggcggatcacctgaagtcaggagttcaagaccaaccaatatgggtgaaaccccatctctattaaaaatacaaaaattagccaggcatggtggcgagcacctgtaatcccagctactctggaggctgtggcaggggaattgcttgaagacaagaggcagaggttgcactgagccaagatcatgccactgcactccagcctgggtgacagagcgagactccttctcaaaacaaaacaaaaaaatgctgtgtttaagaagagggtatctgaggatcatggaattttagtcacagaaaaaaacagaaatactaagtgtttattattcttaatcagtttcatcacatgtaggtcctgagtcaaggacttgaatgaaaatcgtttattttgaagaagttcccagggaacagcattagaagtatgtcgaagggaggaagggaagtgatgtagtcaataaaggatatgttatcaagccattactactgtgggcaaccagagtcaatcccactggaaactgggaggcatgatcaaatacaagcctcagagtttccccactggaggtgcaagggagctgggatatttatccaccaactttcttgagtcattggttgatggttgtttccaggagacatcaactctcttgcacttccagcctgttaggccttaagcaggctctggccatggaaaaatcacttcaacagaaaagatacaaaggctgatagttagaagtcgagtccaaattcaataagatggtaaagagagacacagctggggaatcaacagaggcctgtaatcggtatggaagggacaatagtcgttaaaacaaagctccctctgtacttgtttctgacactaatccaaatgaggacctccaattcccccttaggaaatcatccatttagtccaacccatagattggcttataaggacatggaggctcagtgatacttagtgacttgctcaagggtgcacagatgcagtagagaaattggacatcttgatgtattaatatgtgagtttgatgaacatgagtaaaatgtgtcttcaaatatttagacagagagaaagaaaatagctgtctgagacattcaagtgaagcatttcaaatggaaacttcttagcttatacttagccccagccagactcagaaacagatataggcactagactagacagcatcaacattccaacaggagttttcccttcaccgtggaagattattattgtgcccacagaaaatgtctgtgcatagacagagcccatatgactcttgcattttctttcctgacttagacataaatttggcaaaggagcatcatgcgaagtggacagaacgttccttttgtcctttgaactagacaagaatcaggcaatgaccctgccttagcactttatttagagatgaattcccccgctctagggttttggtggacaggtttatttcactgtaagtgggaaaattcctggctgtttctcacctcaccgaagagtgctaacagagggattcccattgatctgatttgtttgcactgtaaggctggattcaacttcagcgtgaaatcatcttgcaatctgaaataatcttgattggatttccgtttggattaacatcacgtaagagttgatatccactctaccatcagagattgtggtctatgctacttcttttgtccctttgttttatataagtaacgagcttggagatgtaaatcagtcaccattttaaactgattgatcaaactcagtaagaaataaaaccttttcatggaactcactcagccttcaaacatttgcaaattaactaagtcataagtactctagaccaatttataaaaacacagttaaaatatctcaattaaaatcatacatactcacatgttcaaataaactgcaataagcttctataaaattgcttagaaaatataatttctgttttaaatttgtaaattatttcccaggtcatcaaattaataattgaaaaaaaccttctaataattggtgggtatttctgcctaattttcattaaaagtggtagtttagtctgtcctcctgaagcacttaacctgattttatatcttaataaaggaacactatttaggagtttggggactgtgctatgctgtgaaagccattccttggagcccatttttgttattgatgaaattcttccagtctgggatgaacaaactgtaaagccataaataaaagaccaaggagaagaaagacactctgatcagacattcctaattctaaatatagtttaagaatctgtctcctgttcattttagcaaaaggtttggagataacatttcacactgacatatttccatacaatcatttaaatttattatttccagtttttagtgtaaatatacatatacacatagtctctctttatatataactaaaaatctaagctcatcctagaaatattttgggaatatgtattttataaagaaacagaatcagaatataatttgttactcatctctctttccaaaggcaacccaagttaatttcctggaatctctcctagtagtatttttaagcattcatttgtcttttatctagctggaattaagttaaatgtgggattgtgtttcatgccattgttttatattgtaagatattaaaacataatatttttaagttgtagccatcaatttaatgattaactacacaataattcatacattacctacatttctatgagtttttcaagtctacgtgtgatggtgagacctgcatttgagataaggggcaaaccgagtgcatggaaggaggtacagaggtaatattagagagctgaccttaatcctgtagagccaggtcatgaaaagggagtagagaacctcaagagaagagcagagggagaaagaatgtgagtttgacgacaagttgcattaataaaaaaccaacaatcaagtcatgtattatttgtagacatacaaaagataaatactttttaagagtcttgaggccggatgcggtggcccaagcctgtaatcccagcactttgggaggctgaggcgggcggatcacgaggttgggagatcgagaccatcctggctaacatggtgaaaccccgtctctattaaaaatacaaaaaaaaaaaaaaattagctgggcgtggtggcgggcacctgtaatcccagctactccggaggctgaggcaggagaatggcgtgaacccgggaggcggagcttgcagtgagccgaggtcgtgccactgcactccagcctgggcaacagagcgagaccctgtctcaaaaaaaaaaaaaaaaaaagaatcttgaaaataacaatgttgaatcataaaagcatttcacattttccttgatgaccttctaacttaagcaatcttaactggcaaaactaaaaaatcaaaatattaataattcccccacgatatgtgtcctagtttagtttataagtcttggcacttaagagatctaatgagaacttacatttaaaacatgttttaaaataaattttaaaagctagagataaatccatggacagtaaaccatgctagaggtaaatccatgggcaataaaccatgccagttctcttttctgtgctaattattagattatcaatgcctttatttttctcccctttctgtcttcctcttttgattttgttttcaatgttaaaatgccaaggcacttataatgcttcccatattaggttttcttctgaaaaccatttgtccttttctgtataccagattctcattataactgggtctgtgcgtgtgagctgtggagcctccacctttgtaaacaagcctaaaaaaattgcttctgtaactaataagcctgatgccttcagcccatagggatctctttcatctctgttctaataaaacttactagcaattaactcataatcctaacctctgtaagcctttgtaatttatttttggtatactcattcctttgtcttcactgcttaataccttattaagaataaggactatgcaaacttttgtgtgtgtctttcagacaccaacccagtatttggcacataatatacctgccattaattaatatttttgctgagtgagccaacttcctttggatgggcatgagataaccacttctgtataatacattctctccagggcaattaaagcagtttttcagtgtgtgaaggttgtaaatgatcaactctcaacagtccttgatcttttaaagcacaatgagtgaaggaaacaaagctgttgactcataaaaatgaattaataaaaagtaacctctcctaagtaagaaatggaatataaaggatgagtgttgagtgaccacaagggccataactggaagttgtgatggagaacacatgtgagttatttgcaagaagagtaaacatattaaagatgaaaagctctgtgcaaagaatagtcctaaccaatactgtttaaaggactatccagagtacagacgatagatggaattcttagggaaacagcctgtgcttgttcccccaattatttctctgggctttgtaaacactgcatatttagtgtttgtccattaccattcggggtcattacaaaagaactcagccttgacctggattcctgagaaataaattacagcttttcttattaccttccagtagaacttgaagcaataattcaaactctacgttaagtcatcatatatgatcacaagtgagtatgttaataacaaaatggatattcatatacagacccgagtaaatttctgatggcagtcacatcttgataggaataaatactgattcattacaaattacttaataaatgtacatctggattctcaagcattataacagatgatagaatattaatcttgtttgttttcagagcacttctttttctttaagttatacttgctgctatttacttcgccagaagactgattgcattattggccccaattcttcatcattactacctccctggatccatgcccttagacatgtaactttataattgccttctactcagcaatgtgacacattgcaaatgagatgttggcaaatgtcacatctacagagaaataaaaagcagttgtgcaattgggcttgctcttagggttgtcctctgacactgccatgagaaggataggcccaggctatccggccagaggaggaatcacatgggctagagctgagtatccacagttgtctcaaccaaggcaaccctagataagccaacagcaagtctaccttcacacatgtgagcaggctcagtcaaggcaagcacgaccatgcagtctacccatacaagcgtaagctaaacaactacttattgttccaagcctctacatgttgggttagttcgttacatggcattagtatgaaaatacctaactgatacaccttgatttctcaatattcaaatataattgcttcttattaatcctaagtatagaagcatatggacaatgactagaaagactttgagtaggtcccattcataggatgtgatatcaaattaaattaaaaatacaatgtatttttcccacaaaatgctgagaaagtttgaaccattctgtcttcatttttttttcctacactaagaaccaggtgactatagaagagtctagctggccttatattgggttctctaggattatgtatggagggagcatgccgtgccacaggggcccacatagggaagcaccaggatcatcaggagacagagggagcaaggggaaaaatgtgagcaaggtcttttattgttgtttccacaggaacaaataggcaaggtaatgtaaggcaggcttaggattggcttgtttgaataatttcagcaggctctggggtgtaggagctctctctattgtctggtacctggccctgggtgatggagcagtagaatattggccctgagtatgacagcctaatgagaaggtggtgggtatgtgggctctggattggttagtttgtatatgacaggtgttgtccttgttcactgtctccaggaattagctagccctcagtggggcagtgcttccagtgtcagcgaactccaaactggggtggccccacatgtcaaagcatcaaaaatacagaaaataaaaaggcatgactaatacaaccttcccttcaaaaatacactcctaaggcaataatatattactgttcttagagagaaaagttaagggagttgcactgtacttaaagtcatgtagttacgctgtgataatgatacaatgaccacaaaaatctcaaaatatttttaaaggaatcctcagtcttatataaagtttgcagtgttaacttcttgctatactgtcctctttcgagggttttctttccaatgatcaacattgattgatgtaggaccttcttagcgttctgctaaatatgtgggaaaaatacatggcgtgtttcctgaatttgtggaatttttgcaggggaagcaataagagagaaatagaaggcaatgtgaacttaatatgctttaataatgatttactgcacaactactgggtgctaggcactatgataggtgctgggggatttcagtcaaatgccatttatgctttcaaggaactcatagtttaatgagcacaaattatatgaaaacaaatgattgagctatggtgagcagtcaactctgttggaattagtcagaaagcttcagggaggagatcatcaaggtgggccttcaaggatgagtttgacacagggctgtaggtgacacttcgggcaaagggaactgtatgtgcaaaggcacagagtcaggaattaaagtgtcataagaagctacaaacatttcctttacaaccaggaactggggtgtgtgtgggaaagtggtaagacattaggctaatccagaagcaggttgtgatcaaggaggagctcaaagtctgtactaaggagttagggctttaccccactaacaataaggaacaattcatgagtcttaagcagagaaataatataaacaacctgcctgcttaaaaggttattcaggctttgctatgaaggactttaagttctctgagggtaggaattctatccatctttttcacaatctgtaccccagcacctagggcctggcacctaggatgtattcatgtagctgagaacgctgtgctacttaaatgttccaatgctcccccgtacttcctagttctctttgcagttagactggagccctgtgattagttctgtccagtggttataaccagaagtgacttggcgaccatttggatataggaggtgaaggtgaaaagtgaacctaggatgacatttgaaatcttgcttggggtggttcagaacaggttataaggaacaagtatgggacaattttggatgtcctgagttcaagatgactgtgagatgaagtttttaattagaatagagctaaatgttacaaggtttgacataggcaacagttactatgggaaatcaggaaggtaaagtattaaacatgtagcactttgtgggttctgctagagtgactcactatccaggtttgcccaggactgaggagtttcttgggatgcatgaaggactgtcaatgccaataccaagagagttccaggcaaaccaggatggttggtcatcctaagcctgctataccttaccacctgcaaagaatagctattgagtatttctactctgaattcagaagtttgtattcctccgaacctctgtatctcaactaccattcagttgtatggaaaatgaatccaaattggccagagtaggcaagaaagtataaattctgtaaaccagtgttgtgcgagaaccaattcacaccagctcacaagagctgattttactcatttcttcacaactctacatttgctgagtcatgcgaataggttgcagttggccatggtgggagaattgacactatggaaattagcaagttctacatattagagcttctctcccctatccccaaccccagaactggttgttaaacatttaccaggacacctctgccataagctgagttgaaaaggtttggaagacattatattgtggggatagcccaatgtagatgctattggtacctcaccctgcatccctttacctagggagtgcacttatcccccaggtgctgtgagtgttggcagctaacaactcacaggcacccctttttctaggaattgtcctcagccaacaggagttgccgtggctggaatacctgggaggtaacgccctacacccaatagtggcccgtagcccatgattgactcatagagtggtgtcaaaggtcaggctttttaccctaagttgggacagcaccgtggtaccattcatactccagaactctccaggatcaggctgagaccagtctccagctgtaactacgtccttgcctagctgcctctgcttccctatattgcttcccttattccctcatctgtttcccctgagagcttctctcaatgaatccctgccttatgttcatattaataatagccaaaagtagaagcaacccaaatatccattgatggatgagtggataaacaaaatggagtatatccatacaatgtaatattatttggccttaaaaagaaaaattggctgggcgaggtggctcatgcctgtaatcccagaactttgggaggccaaggcaggcagatcacttgaggctaggagttccagaccagcctggcccacatggtgagactctttctctactaaaaatacaaaaaattagccggacatagtggcacatgcttgtaatcccagctacttgggaagcagaagcaggaggattgcttgaatccaggaggtggaagttgcagtgagccgagatcacaccgctgcactctagcctgggtgacagagtgagactccatctcaaaaaaaaaaaaaaagaaaaggaaaatgattctaacacatgctccaacattgatgaaccttacattgatgaaccttgaagatattatgctaagtaaagaaagcctgtcataaaaacacaaatactgtttgattccattcatatgatgcatatagagcagtcaaattcatagaaacagaaggtaggatggtggttgccaggggctagggagaggaaggaatgaggagtttttgtttaatgggtacagagtgtctattatgcagagtgaaaagagttctggggatggatactgtcaatgattgtacaacaacatggatgtctttaacactgctgaacttaaaaatggtaaaagtgataaattcttatgttatttctattttatcgcaattaaaaatacaaaataaaagacattaaatagtttttttaaaaaacataaaatacaaaataaataaattatttaaaaaccctcatcttaggctctgcttcaagggaatctaacctaacacagtcagcccaggagaatttctatggaatgaacatataatctccagtacatatgccatgtgctaacaaacacatgagagaactttatgatctgtgtgctttcgttgagcagagaacgtccctttgattcctgagcttactggaatatcattacgtaattctcccccatttcctgctgcatacctacaagtaatctcaaaaatgctttcaaggagagttttcaattttgcattttgaactttggatctgccttcatttaactaagtgagagaaggagaaacaaaattccagtgtattagcatgacatttaaggtggagaaatgtaggcagcaggcaatcatgtggagcagcggtttacagctgaattctaccatttgtagctacttaacatgctgaaccattcctctctgtctggaaaaatcataaaaaggggcccgtcagcactctgagtcactgctaagaagcttatgcagcctcacacctgcatttaaatgagtgtttccggggcaaaaatgaaggacctcagagaaatgaaacggagcactctagcagagaaaaacgatattggtttctgtctgcatttgtaaattaactacaagaagaacacttctagaattagtttaattattaatagaaatcgctttgaacaatttttttgcttcacattttattttaaatgaggacggtcatagaaggtttatcattaggtggcaaaatttgatcatattcaaaatgtaaagaaacagccactgataccaaggtatggtgcctcacacaaagtaggaattctgtacctatggggtgaactcatcaattacgtcaaactcaaacataggtttcaaaaccaggacttgtgcatacttcatctttagtttcttctttctcaaattttactgcttagtaaggtatagcttacatagagtacagtgagtaaattttaagtgttatgttttgactaatttacacaaacacacacacatacacacacacagacacacacacacacacacacacacgtggagcccccatccatattgaaatagagaatttctagtgccccagcaaccctccttaattacctccccaccaagagaccactactatagatcttcctaaattttcacgcttccatggaagaattgtttttccaagttggagcaggagtaatctagtcatagtatcccttgattcttatttcaagattctcttttttttttgagacagagtctcgctccgtcacccaggctggagtgcaatggcacgatctcggctcactgcaatctctgcctcccaggtttaagcgattctcctgcctcagcctccttagtagctgggactataggcgcccgccaccacacctgactaatttttgtatttttaatagagatgatgtttcaccatgttggtcaggctggtcttgatctcctgaccttgtgatccccctgcctcagcctccaaaagtgctgggatcacaggggtgagccaccacgcctggccctcaagattctctttagcccaacatgatcccaagaaatcattagtcttttactgcttaccctcagaagggatcacccttgcactgccctcattgggtgctcttgcccatgccatggccagggtctcattgtgatccttggagcttcggcttacttttggggggcaaaatgcttccaagactctcagtattatagctctaggtccatttctagatgcatgtcctaggtgctgaactaggtcttttcagacattccttacctgccagaggtaagactttctctgtgcatgtcctggagccagagccaccatgctgtcccataagctgcggtctgatggcagaggcagactccattgccaagactccagttcactgacccttaattgtgcacagctcagaagaggtcacagtttggctcagacttcttgaatagcttctagaagaattgtttgaaatgagaagatgttggaaagaactagaaactcttctttcatgatctactccacacacatttcactccaataatactaaacagcttccagttcctggtctaccatatcggttcatgtctccctgtctttgatcacgttattaactctttttagaatatatcacgtttttacccctcttgacgtgatgctttttctttttccaagtctgagctgagatgtcatattctagaaccacaagttcagctaagtccctcttctctagggcctcatgctaatgagcttctttagcattgcttccactgtctcctaaatgtgaggtggtctctgctccttgccagctccaagtgaccaaatagtatctttttataaactcaaatgtagacactatctccatgaaatcttttcacctcttctccaatgaagcgctttgcttcttctctatgtatatttgacacttcattaatacccctcagtggtttttcatatttttatttttcccgttagattgtaaaacctccttcagaagagttttgtttgacattgaattccaatctactccagtgcccagctcattaccccagattcaataaatgctcgctgaatgaatgcatgcagagctgagtggataagcaagcctccttgattaatcacatcaattaaactgggtcaaagatgttttgttatattggttccattatctgactttcggaaaagcaatgtgacctacagagttgacatgcccttgatatggcaaaagatgagtttcatcctcaaatatcccattagcattttattttccctgcttagagtatatggttgacttattcctgtcacagacctaagtaactactaatattgagattttctctctaattcttctgacacttcttctttttcttttttatttatttattatggtttttttttttgcctaaaaagcgtcatctttctggatcacgtcaccgactctagcctttggctttctatccagggacatttttcacaaagaaacaaaactgtttagtgatggtagcagagttatcaacatggtaagtagggaaaaacgtatttgcatttaaaagcaaatcctggacctgtggcagagccaggcttgataattacgtcccttacattggccggcctgataaagcttggatattcacagtgacaagtagcaacccgctatagaccttagtggtcactcacaaataggaaaaaaatcttggaatgttaaattcgcagattagagaatccccttttcacattttctgcaaaatccattttgatgcaaattagattacagaaaatttaagattctcataaatgtacatcatatttctgttagtgacgttttacccttgcccctccacacctttgtgtttaggctcacacatttcaatttcaaaacccagaaccatggtattaattctaaaatctgagctactaaagctggggccctcaagtaagtacaccatggaatctgcgagatagaaattcctagcctcgcattttagtttaaaaagttttagtttgaaagtatgggggatgagctggtggcataagctgtataacaatgatatttttattaaatttgaaggcctaaaaatatcctgtagtaggggaaagtacttttacccaccataaatgttattaggtttgtgtaattgtgccaaaattgtaagggcaaaaatgatctgctttgctattgtctaaaactaacgccagcactatcaattaaaaaatatatatatatatatgatctcaaaaagggagatggtgtagaatctacttagctttgagcagtaccaacagagaattctcctaggactcatactaaatgagttgggttattattaattagtaggagttaaaacaattatcagatcatgtacagcactgttcttaatgcagcctgcctagggaccctgttaggagggtgtgtggccatttgactcttgctttctttatgtaatatcataatgacccaagctagggggattccaacaatgatatacagcagcttatacaaaaggggacttcatgtcattccaaagagtgaaagaaaaacaggaaagcagatgcgagagcaaaaccattccttactgaagacatcatgagtcctttgtttttctttttctattttctattgtcaagaatatttatattcatccaggcaagattgcatggggaggaatatcacagttgtacatttgttgccattgggttctggtttacaactgtcttgcctgagattataaattttcaggttaatgcagtactaatgcagaatttgttcatcctggaatttgtgtatatagcatattaagtaaatccaaagagacaagtagcatatgaggtaaggagtcctgggtttgagctttttctagtaaagtagccagagattgtagttagtaaacatttctgaatgttctacagtacataactgtaaaatagaatgataaatgaggtgacttaccaggccacttccaattttgaaattgtaagatttcattcagtctctcccaacccccaccaaaataaaaaacttgtgaaaccaagtctgtaccagactgacgtgtatcgaaactgtcactctggtgttgagataaatagccataactcttagttactgtaaaaaatagttgagagttatggaggatatgatttaatacatgcttattgaatatatacttcgtgtaaggctctgcactgggaattatagagaagttcaagtatatttaaaacacagcttcttacacagtacctggtctgaagaggcctccaggggaggtgggaagatgaaagaaataattttcaaaattattttggagaagggtagagtagctcaccatagtagtggtctgtctcttcaacaaatgacacttttaaattgctttgatttttgtttctaacttcttaaaaaatgtgtatgcaaccaggattcatattttattacttatatagccaatgttaggaactaaattgtgctcaccccatattcatatgttgaagccctaacccctaatgtgactttatttggagatagggactttaaagaggtcattaatgttaaatgaggtcataagggcaggaccctaatccaatgagactggtgtccttataagaggaaggacaccagtccctcatctaagaggaagaaacatctgagaagcatgtgcacagaaatgaggctgtgtgaggacacagcaagaaagcagctatctgcagaacaaggagagaggctgcaggagagaccaaacctgtccacaccttgatttttgacttccagcctccaaaactgaaagaaaatacaattctcctgtttcagctaccaagtatggtgttatggtgtggcagcccaagcaaactcatgtagctgatttcatgaactttcatgttttctgcactgtggcttttctgatgtttgtaattttccccattccctctccagtcacaaaactagaacacaatcttgggaaaggacacttgttcccacctcccatccccagcacaaaaatctacaaacacatatcggacaagacaacccacattgggccagtgtcttgtgaggggtgtccgacatcatggtaagtcagcaagggggagagactgcacttctaaagtgtccagtacaggctccaagagcaggtggcatttgagctaggccaggttaattcccatcactgttttgtctttgggcttagttgtgcacttctctcattttatcagggtagacagaacgaagacatgaacaatgttttgaaactcactccttcattcattcaaccaataattgaacactgggcacagttctaggtgactgagttacatcggtgaccaaaacagactcatattctacctttggaatttacactctagtagcatgtggagaattagacagtccttgcctttgaaaaattcagcatcttgtggggagatggtccctgtcttaatctgtttgggctggtataacaaattactgtagattgggtggcttacaaacaacacaaatttatttcttacagtactagaggctgggaagtctaagatcaaggtgccagcagatttggggtctgatgagagcccacttcctggttcgtagacagaaggccatcttcttattgtgtcctcacatggtggaaggggtgaaggctctctctggggtcaatctctctcttttttttttttttttttttttgagacagagtcttgctctgtcacccagactggagtgcaatgatgcaatcacagctcatgcagcctcaaccttctgggctcaagcaatcctcccacctcagccttccaagtgactggggctacagatgtgtgccaccatgccaggctaatattttaatttttttgtaaggatgagaagtctcattatgttgcttaggttggtctcaaactcttggcctcaagtgatcctcccacctcagcctcccaaagggcagggattacaggcatgagccaccacagctggcccttgtggtctcttttacaagggtactaatcccattcatcaaggctctacccttatgacctaatcagctccccaaggcccctcctcctaatatcatcactttggtggttagaatttcaaaatatgaatttcgggtggggacataaacattcagttcattgtagtcccacttaaactgatggtttcaataatataataaatgtagagaaaaggaagcctgaacacggaactttgaaagggcctggtaggagcctgggaatgactcaactgagacatccttgaagaattcctgtttgttttttgtccagagagtgccaaggaaattcccagcacaatgtacctatgacaaattcggaagtcgtatgttgggaattaatcctgctttattttcatctcattatatgaatgtaaaatatataagaaatatcagttgggttaattttagctccttttatggaaatttaattatttatacaataaatttagttccttaaaatataaaatcgatgtcacctttttctttgctctttggtagtttttttttgttgttgttgttgctatttctattgctgctgtgacaaattaccacaaactcagtgacttaaaacaacacacatttattattttacagttttataggtcagaagtctgacgtagaggttacttggctaagatcaaggtgccagcaggtgcatttcttcctggaggccctgggggaaaatctgtttcctcaccttttccagcttcatagaccccttcctccaacttcaaaggcagcaagattaggctgagtccttctcatgctgacatgtctctggttctttcttcaaattccctcttccactctaaagggccctcttgattccattaggcctacctggataatccagaataatcctactttaattttttttttaagttctggggtccatgtgcaggacgtgcaggtttgttacataggtaaacatgtgccatggtcatttgctgcacctatcaacccatcacctaggtattaagcccagcatgcattagctatgtttcctaatgttctccctccccctccccgaccttccaacaggccccagtgtgttgttcccctccctgtgtccatgtgttctcattgttcagctcccacttataagcgagaacatgaggcgtttggttttctgttcctgcgttagtttgctgaggataatggcttccagctccatccatgtccctgcaaaggacatgatcttgttcctttttatggctgcatagtattccatggtgtataagatcagctgctagcatgcttaatttcatcttcaaccttaatactcacttgccatgtaacctaacacatccacaggtttccaggattaagacatagacaactttggggagccattattctgcctaccacatgggtttacttaatcaccagggagacaaagtagataataagcacaaagtagataataagcaaaagaagccaaaaaaacttctgtgtgtcctgcaacactaaagaacataaagaatcaaagagctttatttttcatctaactcagtttggtaagattccaatttagaagctaaggtaaaggaaaactgacttcctatggtacaatttaaattcagtataaattcagtgcttgcccaagtagaatgtccagctgtgggtacggagcaaaggtgtcagtaaactgtattcacacccagggcacttaagagacgttattttttgagacttgcaattgatatgctttgcactgtaggggccacgtgggaatttccacctgagaagcatttgttgttaagcacttttttcccctgtctttgcttcagattgtataccttccagggacagatatcagtattatacatagctctttgtatattttggggggtgactgagaaacatatttcattacatgtaacttgctggccatcccaaatattacagtaacaataaccggtacagcttgggtatcccatatctgaaatgctcaggaccagaagtgttttgaatttcaaatgttttcaggttttggaatacttgcatatacatcgtgagatatctcggaggatggaacccaagcccaaacaagaaattcacttatgttccatatacaccttatacatgtagcctgaaggtaattttatacactattttaaatagttttgtgcatgaaataaaggttttgtacattaaacaatcagaaagcaaatgtgtcactacactatctcaagcccatgtggccaatctttgaccactatcatccctgtctctgaatttatatgttactgatgagcaatcatcttcttacacttattcacacctaagtacctagtaaaaaaattgacaaaccattaatacagtaaaaaaaataatgtgttcaggataactaagcagcaaagtagcatcaccagattacttgtattttatcactattacccatagaggtatctgtaggcctttttgacattttcaacaatatctttacagagcagagaataagcaaaaagtaatgcatgcaggtcttggcttcatgtgggacatcatggggaacctattgttggcatttctggccagcatacgtgccattttattaattgttctgggcaatgcttacaggagggagtctggataagggcagaaaatatatattgcaactgaaggggcctgagagggtctttttttccccttggagaagccgaataaactgtgtgttgtgcacctgcattttgacggtgactcgtcacatgtgatcaggagtggaattttccactgtggcatcacatcatcactcaaaaagtttcagattttgaagcattcagattttggagttttggattcaggatgctcaatttgtatttctgtttttaatctagcagttacactgagggccaagactctatgttaaatgcccaccatatattatctgatttaaacatcacagtgatgctgcagggaaggccctgcagtggccattctcaatgctggctgcacattagggccccctgagcagctcatgagattccggaaacccaggctgcacccagtccagttaatcagaatctctgagggtgggatccaggcccctcattttttaaagcttccaggattttctatcacacagccagggttgagcctagattcatctgattccaagcccagatatttttgcctgctgagtaagtagtatagcccaggcctttccccatcttttgccccaactctctcactcacaggccctgccccccatatcttacacgcatacttagtttttaagagacagagtcttgctccgtcacccaggctggactgcagtggcaagatcatggctcactgcagcctcaacctcccaggttcaagcgatccttctgcttcagtctcccaagtagccaggactacctgcacaagccaccatgcccatctaatttgtgtgtgcgcgtgtgtgtgtgtgtgtgtatgtgtgaagacagggtcttgctctgtttcccaggctggccttcaactcctggcttcaagcaattctcctgacttagtctctcaaagtgctgggattacaagtgtgagccaccacacccagccccatgtaggcttttattcccagttacatttttgcccacaaaatgaaaattataaatttttgaagtccttagtataataccaatgataatctgacattgtttctactgaaaataaacattactgttattggcattttacttttgtttttattagattttttatttttatttttttaatggggtgagggaggtgtctttataagtaacagtgatagtaattttgcaatactaattttgataactaagaatgtatcattttatataccaggaattttatggactttgccttgcatgttttgtgacattttttcggggaagattctattatcaggaggaaactgaggcttactttctgcaaagacacagccctgacatttaagcccaaatctgtgttattttattttattttagaggcagaatcttgctctgttacccaggctagaatgcagtggtacaaacatagctcactgcagcctcaacctcctgggctcaagtgatcctccaccctcagcctcctaagtagctgagagtagagctgtgcaccaccattcccagttaatttaattttttgttatagacagggtcttgctatattgcccacgctggtcttgaacaccctgcctcaagcaatacttctggcctcaagcaatcctccacctcaacctcccgaagtgctaggactacaggcatgaaccctcatgcctagcccagatccatgttattttaggacatcagtttatagcttctgtttgatgtattctaaactcgaccgaaaataaaactctcttgagaaacttgttgccctcctgaaaattctgtctggaatgggacttagcaataggatttttaagtttggtccatggtgttcctgggctactccaccacgctacaatacattgccttcaatcagggcttctcaaacactcatgtgcttgcaagtcattggggatctggttaaaatgcagaacctgatgaagtaggttaggggcggtcctgagattctgcatccctacctagttcccaggagatgtgatgcttctggtccacaaaccacattttgagtagccacttagtgcctggtaacttaagttttctgagagcaaagttctgagagcactgttgattctccactcattgtagtgtctttttgcacattgacttgcaaaagctccttagtatatctttgaggaaaccaaaaaaaaaaaagcacttttaagacaatgacatcaatatgaactcagtgctttaagtgcattttataaatagcacagcagataaatcacctcttttagaaagaaaatatttaaccaagtgtaccttgtctccattagacactaagcacatctctaattcattcttagataacagagttccttacccaaattaggtgtttaaaaaggcatttcttaaaggaataaatcattttacaaacttttgaattgtttttaaattttgcatcccatattctaacaccgaggtgcctttttaaagatgcatctgtgaattttcattcaaaagtatatatagactacataacatatgcatcttaggtgtaatacaaagacatagaatatttaaaggcaattaatatgtctatacaaaatatttatttatttttttattatactttaagttttagggtacatgtgcacattgtgcaggttagttacatatgtatacatgtgccatgctggtacgctgcacccactaacttgtcatctagcattaggtatatctcccagtgctatccctcccccctccccccaccccacaacagtccccagagtgtgatattccgcttcctgtgtccatgtgatctcattgttcaattcccacctatgagcgagaatatgcggtgtttggttttttgttcttgcgatagtttactgagaatgatgatttccaatttcatccatgtccctacaaaggacatgaactcatcattttttatggctgcatagtattccatggtgtatatgtgccacattttcttaatccagtctatcattgttggacatttgggttggttccaagtctttgctattgtgaataatgccacaataaacatacgtgtgcatgtgtctttatagcagcatgatttatagtcctttgggtatatacccagtaatgggatggctgggtcaaatggtatttctagttctagatccctgaggagtcgccacactgacttccacaacggttgaactagtttacagtcccaccaacagtgtaaaagtgttcctatttctccacatcctctccagcacctgttgttccctgactttttaatgattgccattctaactggtgtgagatggtatctcattgtggttttgatttgcatttctctgatggccagtgatgatgagcattttttcatgtgttttttggctgcataaatgtcttcttttgagaagtgtctgttcatgtccttcgcccactttttgatggggttgtttgtttttttcttgtaaatttgtttgagttcattgtagattctggatattagccctttgtcagatgagtaggttgcgaaaattttctcccattttgtaggttgcctgttcacactgatggtagtttcttttgctgtgcagaagctctttagtttaattagatcccatttgtcaattttgtcttttgttgccattgcttttggtgttttggacatgaagtccttgcccatgcctatatcccgaatggtaatgcctaggttttcttctagggttttatggttttaggtctaacgtttaagtctttaatccatcttgaattgatttttgtataaggtgtaagaaagggatccagtttcagctttctacatatggctagccagttttcccagcaccatttattaaatagggaatcctttccccattgcttgtttttctcaggtttgtcaaagatcagatagttgtagatatgcggcgttatttctgagggctctgttctgttccattgatctatatctctgttttggtaccagtaccatgctgttttggttactgtagccttgtagtatagtttgaagtcaggtagtgtgatgcctccagcttcgttcttttggcttaggattgccttggcgatgcgggctctttttttggttccatatgaactttaaagtagttttttccaattctgtgaagaaagtcattggtagctttatggggatggcattgaatctgtaaattaccttgggcagtatggccattttcatgatattgattcttcctacccatgagcatggaatgttcttccatttgtttgtatcctcttttatttccttgagcagtggtttgtagttctccttgaagaggtccttcacatcccttgtaagttggattcctaggtattttattctctttgaagcaattgtgaatgggagttcactcatgatttggctctctgtttgtctgttgttggtgtataagaatgcttgtgatttttgcacgttgattttgtatcctgagactttgctgaagttgcttatcagcttaaggagattttgggctgagacaatggggttttctagatatacagtcatgtcgtctgcgaacagggacaatttgacttcctcttttcctaattgaataccctttatttccttctcctgcctaattgccctggccagaacttccaacactatgttgaataggagtggtgagagagggcatccctgtcttgtgccagttttcaaagggaatgcttccagtttttgcccatttagtatgatattggctgtgggtttgtcatagatagctcttattattttgaaatacgtcccatcaatacctaatttattgagagtttttagcatgaagggttgttgaattttgtcaaaggccttttctgcatctattgagataatcatgtggtttttgtctttggctctgtttatatgctggattacatttattgatttgcgtatattgaaccagccttgcatcccagggatgaagcccacttgatcatggtggataagctttttgatgtgctgctggattcattttgccagtattttattgaggatttttgcatcaatgttcatcaaggatattggtctaaaattctcttttttggttgtgtctctgcccggctttggtattagaatgatgctagcctcataaaatgagttagggaggattccctctttttctattgattggaatagtttcagaaggaatggtaccagttcctccttgtacctctggtagaattcggctgtgaatccatctggtcctggactctttttggttggtaaactattgattattgccacaatttcagctcctgttattggtctattcagagattcaacttcttcctggtttagtcttgggagagtgtatgtgtcgaggaatttatccatttcttctagattttctagtttatttgcatagaggtgtttgtagtattctctgatggtagtttgtatttctgtgggatcggtggtgatatcccctttatcattttttattgtgtctatttgattcttctctttttctttattagtcttgctagcggtctatcaattttgttgatcctttcaaaaaaccagctcctggattcattaattttttgaagggttttttgtgtctctatttccttcagttctgctctgattttagttatttcttgccttctgctagcttttgaatgtgtttgctcttgcttttctagttcttttaattgtgatgttagggtgtcaattttggatctttcctgctttctcttgtgggcatttagtgctataaatttccctctacacactgctttgaatgcatcccagagattctggtatgttgtgtctttgttctcgttggtttcaaagaacatctttatttctgccttcatttcgtcatgtatccagtagtcattcaggagcaggttgttcagtttccatgtagttgagcggttttgagtgagattcttaattctgagttctagtttgattgcactgtggtctgagagatagtttgttataatctctgttcttttacatttgctgaggagagctttacttccaagtatgtggtcaattttggaataggtgtggtgtggtgctgaaaaaaatgtatattctgttgatttggcgtggagacttctgtagatgtctattaggtccgcttggtgcagagctgagttcaattcctgggtatccttgttgactttctgtctcgttgatctgtctaatgttgacagtggggtgttaaagtctcccattattaatgtgtgggagtctaagtctctttgtaggtcactcaggacttgctttatgaatctgggtgctcctgtattgggtgcatatatatttaggatagttagctcttcttgtttaattgatccctttaccattatgtaatggccttctttgtctcttttgatctttgttggtttaaagtctgttttatcagaggttaggattgcaacccctgcctttttttgttttccatggcttggtagatcttcctccatccttttattttgagcctatgtgtgtctctgcacgtgagatgggtttcctgaatacagcacactgatgggccttgactctttatccaatttgccagtctgtgtcttttaattggagcatttagtccatttacatttaaagttaatattgttatgtgtgaatttgatcctgtcattatgatgttagctcgttattttgctcgttagttgatgcagtttcttcctagtctcgatggtctttacattttggcatgattttgcagcagctggtaccggttgttcctttccatgtttagcgcttccttcaggagctcttttagggcaggcctggtggtgacaaaatctctcagcatttgcttgtctgtaaagtattttatttctccttcacttatgaagcttagtttggctggatatgaaattctgggttgaaaattcttttctttaagaatgttgaatattggcccccactctcttctggcttgcagggtttctgctgagagatccgctgatagtctgataggcttccctttgagggtaacccgacctttctctctggctgcccttaacattttttccttcatttcaactttggtgaatctgacaattatgtgtcttggagttgctcttctcgaggagtatctttgtggcgttctctgtatttcctgaatctgaacgttggcctgccttgctagattggggaagttctcctggataatatcctgcagagtgttttccaacttggttccattctccccatcactttcaggtacaccaatcagacggagatttggtcttttcacatagtcccatatttcttggaggctttgctcatttctttttattcttttttctctaaacttcccttctcgcttcatttcattcatttcatcttccatcactgataccctttcttccagttgatcgcatcggctcctgaggcttctgcattcttcacgtagttctcgagccttggttttcagctccatcagctcctttaagcacttctctgtattggttattctagttatacattcttctaaatttttttcaaagttttcaacttctttgcctttggtttgaatgtcctcccgtagctcagagtaatttgatcgtctgaagccttcttctctcagctcgtcaaagtcattctccatccagctttgttccgttgctggtgaggaactgcgttcctttggaggaggagaggcgctctgcgttttagagtttcccgtttttctgttctgttttttccccatctttgtggttttatctacttttggtctttgatgatggtgatgtacagatgggtttttggtgtggatgtcctttctgtttgttagttttccttctaacagacaggaccctcagctgcaggtcagttggaataccctgccgtgtgaggtgtcagtgtgcccctgctggggggtgcctcccagttaggctgctcgggggtcaggggtcagggacccacttgaggaggcagtctgcccgttctcagatctccagctgcgtgctgggagaaccactgctctcttcaaagctctcagacagggacatttaagtctgcagaggttactgctgtctttttgtttgtctgtgccctgcccccagaggtggagcctacagaggcaggcaggcctccttgagctgtggtgggctccacccagttcgcgcttcccggctgctttgtttacctaagcaagcctgggcaatggcgggcgcccctcccccagcctcgctgccgccttgcagtttgatctcagactgctgtgctagcaaccagcgagactccgtgggcgtaggaccctccgagccaggtaagggatgtaatctcctggtgcgccgttttttaagcccgttggaaaagcgcagtattcgggtgggagtgacccgattttccaggtgccgtctgtcacccctttctttgactcagaaagggaactccctgaccccttgcgcttcccaagtgaggcaatgcctcgccctgcttcagctcgcgcacggtgcgcgcacccactgacctgcgcccactgtctggcactccctagtgagatgaacccggtacctcagatggaaatgcagaaatcacccgtcttctgcgtcgctcacgctgggagctgtagaccggagctgttcctattcggccatcttggctcctccccctgtctatacaaaatataaggagcaaaagaagactgttaagaggctaaaaataacctaaacatgccaaagaagtagagagaaaattgagggtgtttttaacatttattttaagttcaggggtatatgcgcaggtttgttacataggtaaacttgtgtcatgggggtttgttaatacagatgatttcatctccgaggtattaagcctagtacccattagttatttttcttgatcctctttctcctcccaccctgcaccctctgataggtcccagtgtgtgttgtttccctctatgtgtctatgtgttctcattatttagctcccacttataagtgagaacgtgtgagttggtttttaatttatttccctgacttgtgatacccattgtgaaaatgtatattatgggtttaaaaataataatggtaataacagaaatgttaaaagctaacatttcttgagcactttctatgtgctaatttgtactgatcactgactgagcccttgtgtagatgaggaagtggaagagttgagtgactgcccccactagcatggctgtgatgtgcaaagccaggactcacccaggttattcattcctaaactagaacacctctgagcaagttttctttgcacttgagtaaagcagatggattaatgtttgctagaaagctaccagacattgatagagagccaagtttgcaatggaaaatttgtctaaacctgctagtgttaactggtatgatctccccttgttttgagaccaggcttgttctggaagtgttgcggctgttttcttctacagctctatcaatcccttcctctttccctcccttgcagcaccaacaccttcaccatcatcacccttttatctcttaggtcttgatggcttccacattttaggatatctgatggtcctccaatgtcacttaatgtattttccattgggcagcatcttctctagcctcagataagaattaaagttctctcatgagactagtttgaaaagctgaacctatgagacaaagtataattttccaatacccataatgatggatattctaaataaagaagagtatatgacaccaacaccaagttttttttttaatcaaaagcaaggttgactcttggtattcctagaatagaggcttttataacagaccttaaactgccttaatttaaagcaggtgtataaaatacaaaatggtatttaaagaggtgtagagatattaattaaaataggcttgctgaaatgccagggatatcatcacttctgaaaattgaattaagccctgaatgtcaatggtgaattaacatgaatagacttatctatccctgtccaaatatattttatccacaagctgtgtaatacacgatgattaaccagaggttacagattctagctgaaacccaatcaaattcttcagaatcctaattgaggaatgcattcaggtcaaagaatattaacagaaaagcctctgtcatttaaagggcaagcagagtgagtgcttaaaagtgttcaaaattttgcttaattgttctcttcttgagctattgttcttgatgatttagaaaacctgtgtgctgcaagtttaactgctttaattacagtgatgtcaaatacataggcctttctatttaaagggattttaatttctgtggcttatgaaagagaaactgaaagcatagttaaaagtgaatatgttagttgagaaagttcctgttcttaccaagcaataaaattttcctaaatggatgtttgaaggagagctggtgttcagaggtgtggttcagttgaagctcctctggtagaagcccagcattttgtctgtctagtttttttgtccttagcattgcttacttttgtaaagccccagatatatataactcattgttaaagtatcacatggtttgtacagcaggatgatttgcattatatgaaggacaccgaaacacagaaaatgaaaggtctacggtgtatgacaaacaggacaaatgctctagcaaaaataaattctactttctctcaaaattagcatacttgttatttaaagaaatgtgccagaagagaaatacaagattttcttttcttttttctcattgactttaactctctctgaatggcacctataactaaaaatacatctcgggaatcaagtaaccctcttttatatacatccctctaaatctatggctaagttcaatgtttaaggttgtcaaagtggctcccatccaaaatcgggttaacatttgcactttgcctaaagtgggactcctagataaaattcaaacgacctttctggtaatcccagcgtgtgggttttagcatcaccagctggctccaaatgggccactgctctctctacaaagaggagggagccttcaacacaggggccatgcttgtccattcaactgtgtctaaattcacagatcagtgtttctctcagtccctagaccagcaacatcagcatcccttgggaacttgttagaaatgcagagtctcaggccttgcctcaccgaatcagcacctctggggttggacctagcaatgtgtgttttaacaaatcctccaggtaattctgatgcacacctaagtttgagaaccacttttgtaaatgtgtgtttcaacttgacactaaccaataattctaccacttaacattaacagctttcaattttatgatcctttgtgttggacaggtcaaagtgggtgatttcaactgcttaatgggtacagaattttattttggggtgttaataatattttggaactagatagaggtggtggttgcacaaccttgtgaatgtactaaatgccactggattcttcactttaacaatgagtactattggccgggtgtggtggctcacgcctgtgatcccagcactttggaaggctgaggtaggtgtatcacatgaggccaggagtttgagatcaacctggccaacatggcgaaactctgtctctattgaaaacacaaaaattagctaggtatggtggcatgtgcctgtaatcctagctacttgggtggctgaggcatgagaatcccctgaacccgggaagtggaggttgcagtgagccaagatcataccactgcactccagcctgagtaacagagtgaggccctgtctcaaaaaaaaaaaaaaaaaaaaaaaaaaggttactttgatattttatgttatgtaaatttcaccttgtttttaaaaatatgtaatataaatgaaactcaagtgttttagatatgccagtctaaagaaatctgcaaattaaacaatttccaattcttaatcattcttattttgagtacatcctaattctttttttacacatatgatatgatgcattctaattatacaattactaaggtttcccaagtaaacatataaaacagagtatctgtaaagctgtgatttgagtgcttttcatggaaagtttctcattagaatttcttgatcagccaaacaacagttttcaactacaagcaaaacaagggaaagcattatttggttgtctgtcattgctagggtgaagactataaaagaggcaggaagagtaaaaaccaggcttttaaaattaaatttcaggcaatatcttatagtacctccaccctcatgttgggcaattcaagaggtctattcacattgcattgtatgaatagaattttatttcttttgaaatgtaatatagaatattttattttataatatgatctgaggatgcctcctggaattgtgcaacacaaaggtcttgggtgttgtcctttctgggtagagggtttgttagctactgaatatatttgttataaatatcactggggatttttttaagtaaatttattttttaaaaaaccctaatcctatgaagtttcactaaatgtaaaaaacataaatcaattaaggcttgaagtaacattttattttactgtataaccctgtaatcccacacacacacatctattatagacataatacattactatatagaatactggaaaatatcgtaaaatacattaaaaaaacaatttcccttactctcagaactgagaagtaaaatctgttgtatcttgtgagagtatatatgtatgtgtgaacacatatcacacatatatagagtacagttaataacaaacagcatattccattttaaaacctattttcccttaccatatcagattttttttcttaacgagaaatattcttctacaatatcaatatcatttgaaggccatatagtatttccacttatagacgtagttcacttgattaattttgaattccccttaattgaacacacttaatacttcatttttctttaaaatataacaaccttacccctatattttgtgcttttgctgattacttgtcaaatatatttatttgtggtatctctttttatactagaaacatcaacctctttgtcaaattgttcttccagtttattgtatttttgttaattttgattttaacatgtattttatgtttggtgttttcttttttttttttttttttaaagaaaaaagctctcattcttttttaaaaaatagattcagggtatatgtgcagatttgttacatggacaagtttcataatgctgaggtttaggcttctagtgtacccaccacccaaaaagtgaatatcatatccaataggtaatttttcaacgttcactctcctctcatcctccccacatgaggagtccccagtgtctattattgtcatctttctgtccatgtgtacccatggtttagctctcgcttgtaagtgagaacatgtggtatatgattttctgtttctgagttatttcttttaggataatggcctccagcttcatccatttcatccattttactgcacaagacatgatttcattcttttcatggctgtgtagtattccacagtgcacatatagtacattttctttattcagttatccattgatgggcacttggcttgattccatgactttgctattgtaaacattttatgttcagtgttctctttcatagtgttgccttcctattccaatattatgtacaaattttcctatagtttcatcatcatggttttgttgtttacatttaacgctttatttgaacatcaatgtgatctgtgagatagtaaaaagacctaagtcaatttttccaaacagttaaaacatgtttttatcatttattaaataacacagtactttctccatggatttgcaaaataagattatccaaccaggagcataaacagagcaagttatttaacctctctgtgccttcatttcctcctctaaaagaagaaagccagtaacagcatctccctcaaaaaactgataaaaaaaaatccacaaggtgcctgacacggaataaacttcatcaatattatatgacaaccactagtatgattacaattattattagtgccctaatgctaccactagtatgattacaattattattagtgccctatctacccaactcaatatgctagtgtcttttttaggatatttacaattatatttgtaagtgagatggcctatgttgtctgtgcttacatcaattctgtcaggctttgaatgagggacttgatggcttcataaaattaaaaagttctgcatctgtttattttattactaaatgtagaatttatccttgttgtgatagattgacagaatttctctcaaacctttatgagccctaaacatttctttaaaacaacacttggaaaagtatttcaaggtctttcttaatttttgatctgttgttaaaaatttccctttcttttggatcagttttggtaattgctacaattctagaatgaattgttggggagcatgcctaaaagtagacaccaataagggagttgctctaacagtttaggcaggagatggttcccaattctaaatccatagctttccctaatatcgggcttgataaataacaacacagtaccccccatttataatgccaaaaccagggaattctcctgaatttctttctttcccttagcaccatttaccacagtcccacatcccattcctcagccaggcctgttgcctccatatccaaattacatccaacgcatccacttctctccatctccatagacctcacattagtccaacctccatgaaatagactcagttgaaatagcatcttaattggcttcctgcctccagttttgcacattggcagacaaagtgatcttccaaaaatataaattaaatcatttcactcccctgcattaaacctaatggacttcttttgtgtttcaaatagaaatctaaactccatccctctaagagcccttgtgacttggattagaatttgccctttgccccaaccacctcatcacagatcactgtgccgctctcttgctatgttccagcctctctggactctgtgttcctggagcaagccaatccgttcccaccccaaggtatcagcacctcctggaactttcttctcttctccagactttggtgtagcccctttttcttttatctaatgttcctaccccaatccactcattattttaccttaccccattttattttcatcattgacttcttctctgaaatgttcttgttcattacagttgtgtgtttattgctcttctacctgtaagcattatatgcattatttacatgtgcctgacacatgttttgccttcattaaatatgtattgcatgaatgagtgagtgaatgaatggatatagtcagaatgattttaaaaatgaatagactgaggaatttaagaattagaatttttaaaagttagatataaaaatgatcccccaaactgatatgaggtaatgcttatgttaaatagcttgatttagccattccacagtgaatacatgtatcaagacatcatgttgtacaccatatatatatacaatttttactcgtccaacaatttttttaatgactagaatatacagggagctgggagtgtgtgctctatctctatgtacttgggtgtgattacaggatgtgtaaaatgtagagatcatcaagttgtgtacttaaaattaatgcattctgtgctctttaatgcatgcatgttatttctttaaaaaataaaaccataaatacatgtttaaaatagccagagagagcacaaaatttaaataatatgtgtaacttaaaagcttccatttttacatagtctaggacctaatatcacaggcaaatttaaaatttctttgaaaatgagctttgggattctgtaaagatttggggctctaccatgtggttgataaacaaaattactctctttactcaaggacctaaatggactttaaaatgagctggaaatcaactctggcttcaaggaaaagggtatacccacagggcaaacttgttttgcctcaaaacatactttatcatgtaacgtcccattcctcacccaaattagatagccttacattatcatgtgacatctgttaaataactcaaataagaaaatagttcctgatatttagataaggatacttagatttatagggtattttcctgcataagacactaatgacttttataaaatgtttcataaatgtgttttgtgaaaacacaaatatgagtcagctggcatagcaacatgcacagtgtagcaactcaaacattttctgaataaataaatgaaggaatgaggataagaaataaaaatattagaggtaattatttgggttccagatagagctttattttaattatagtttcttaaatttgaatgaattcactattttaccataatcagaagactgcagcaatcatcaattgcacaacagtgatggcctctgtaatttggcactattagctcctgaaatgtattgagatgtataaatataagcatcttaatcttttcaatataccctagcaaactggccctagcatccctagggctttcggagctaaggggaagttaaatgcccttctcttattccctgccaaaataagaaaaactttattgatttgaaagtgttaatttcctccaacttttcatatatgcagtaggcatgtcaacagagcaaaaatagtcttagctattggaaatgaggctacagattttattaggttggtgcaaaagtaattgcggtttttgtcattactttcaatggcagaagctgcaattacttttacatcaacctaatagattgacttatgtcataactatacatttcccaaaaatacaagacatggttcaaacattaatatttgtgacttagagcatcagaatgaggagattaaaagtttgaaaatgctccagcacttggatgaggcaagaatagtgaggtacagtttaagagagttaagaattaaaagtctttatgccaagctaaatgtgtccttcaaaagctgtgcatgttatgactgctggctccaacgcatctatctagtcagtctctgctattttaaccatcttttttctcttcaatttaccacctattattaggccaagaaaacttgagcatctgtcaagagtaaaaatattttgaagttttcttcaaacacactgaattccatgatttacacatggttctttttttaagagatgggagtcgtgctgtgtcaaccaggcttaagtgcagtggtgcgatcatagttcactgaaatctcaatctcctgggctcaagcaatcctcctgcctcggcccactatgtaggtggtcagccacctacaggtgtcagccaccatggccagcttcatacatgtgttctgaagcaacttttttgaaagcatggtatacacatcacaaagggtgcacaggtactttagggtgaatatctgtatttgcacaccaataaattaacccttctaatgtaaacaattcagtggtttttagtatatttagtatattcatagatgtaaaatgagcatcagtatataattttggaatgttttcatcactccaaaaagaaaccccctacccattaataagcattcttccctccttcctcttcccagaccctggtaaccatttacctttctgtctctatgtgtttaactattctagaaatttcatataaatggaatcatataaaattatgttggtgcaaaagtaattgatgtttttgcttgtgaaagtaatggccaaaactgcaatcacttttgcaccaacctaatacctggtatgtagtgactggcttctttcacttagcataatgttttcaaggttaatccatgttgtagcatataacagtacttcattgctgttaattgtcaaatattactcaattgcatgtatataccatatttgattttccattcatcagttgatagacatttggattgtttttattttttggctattatgaaaaatgctgctatgaactttcaggtataagcttttgtgtggacatgttttcatttctcgtaggtatatacctaagaatgtaattgctgggtcatatgatggctgtgtttaacatcttaaggagttgcaaactgttttccaaattggctatgacattttaccttcccaccagcagtttatttgataaattcctttcagatagaattcataaatattttctcccattctctttgttgtctttttaccttcttgatagtgtcctttgtagcacgaagtttttgttttttataaagttcaatttatctatattttattttgttacttgtcctcttggttatgtaagaaaccattgcctaacccaagatctcaatgacttatacctaggttttcttctaagatctttagagttttagctcttacatttaggtctatgataaatttcaagttgatttttgcatatagtgtgaggtaagggtccaagctcattatgataatgatgagaagttttattttaaataaacatattttaatgtatgaaatttgctaatttaaagaaaaatcttaaataaatggtaaactataaatatctaagaaatgtatctcttttcaggttttctaggaaaatcaacctaggatttatattagtaaggaaatttatacttaaaattttacttttatttattttactttttatttatagaaggtaaggatgaaatgatgaagtgggatagaggttgacacctatatatgtgccaagctctttgtgaatgtaaaattctattttaaggaaaaaaatattgtgttttgaaggctaagaaaacatgtatacaagaaactaaaatggtgccattgggcaccatcttctttaattcttagttttaaaattcagggaaatactttggttttgataagcttaagcctaagtgttgaaaaattcttaagtaaggtttaaaattaaaacgacatcagtaattgttaataaagggatcaccaaaaaaggcttcactatagtcagttcattcacatcaagttacctagtcagtctgggttgattaccttaaaatgtaagaagcctgtattatgactttattttaataataaaaaggtcctttcagttctaaaaacatggctatatcatgttttttacttcttgagcctataaaaacaatttctttataaggactaggataaccaggaggcctagtaatatcaactaaaaaacattttattgatgaaatagtttacagagttttattgaccgtgcaggaaacattcagggactcttcaatcaattctcttagtatttccagtggtagtttgagaacattcccttggcactgtttctatatctgcaaacttttaagagacgtattagctgggcatggtggttcatgcctgcagtcctagctactcgggaggctgaggcaggaagattgcttgagcccgggggatagagtctacagtgagctgtgatggtgccactgtactccagcttggatgatggagggagattctgtctctaaaaggataaataaaacaaactagagatatattcacctcaagttttctctgttgaaaaaccaactagcttttaaggaagtttgtaacttccttaaaaacagttagttggcctttctctgtgctccaaaagcatttatccctttgtcctaaaaggatctacgtattttcctcttctaccagatcattagaagcttgagggcaaagactgtgccacattcataaacataaccctggtatagaaaatggcaataaaggcataaagtttgttgaatgaataaaaaacacaaatgaaaaagtatgtttatggtattggtagagctcctggaacattcatttgcatataggtgaatcaattattgtaggagaggtcgcttcagtaaatgttcagagttttcctgggattctatgacgtaaagatccacaagtcagctttgaagaaggcagctctcaagccctcatctttgccgtccattggatggaggaagggtggcatagcaacaatggttgtttcactgcttaacccaactccctgtagtaaaattccagaggtttcaccaggaagtccaactacactctggtttacatattccatagggattaaatgtcctgtgctccataggtgcattggattatcgcgcatccactaaaccccatagatctgtagattaccttagacctttctgccccagttactgattgagccacatgtatcaggttgtttaggtttccatagcctcccctgtgctcttgagagcttaaagccccttccctagcagagcttcattacacaaaaatggaactaccaacctaattaatgacacagccatacttctttctataagaaggacattttctgaagtcaaatactctacccctgagctgtacccgcaagaaggacattttctgagacaatctgaagaaagtcaccatctgttaatgacttttcaggaagaatttggggttctaactagataaccacatttcagtgttacccttagacatggcccagcttaacacatgagtgagcagagacagatctggatgtgagatgtgtgggtgggtacaagcccattctgtttgctttatttttaatgataaagcagtagagcttggaactgtggatattggctctattgcatacatgaaatgtgtaaatgctcgtctctttatttatttaaaagaaaaaataatatgttgaaaggcaccacaagaagtgcccaatactgtccaataccatgctgaattcataatttcttctatgtataaggaattgtgtgccacacacttagcctaaacagcaatcatataaaatgacatcaatgaccacaactatcaattatgatatttttattcaagtgctcaggtattagagcataacaattgcagagccatttcagggttttctgggggtgatgagtttaacaatggacaacatttgggtactgaacttcagggacattagccgtgtctgttagcaactctgcaagttgcttttgctgtatttgaacttacaaggtacaaaatatacctcacaaggggaaattcagaagacagtctaataggtggctcccttctgtgctaatatgtgactttcaatccatgtcataagattcttataaaaggtttagcatttgtaagtcctcatgtatagattgaaaagaaactatcagcacaaattcccactgaaaagaaaacttgattcttagttgttttgaaaaatgattttatttttatatttttctcaatattatagtaaggaaatgagttcatggtcttgtaagcatttataaagtatataaaatgatgaagagaaaataaattcctgtaaattgaatatttttataatctcaaggtaaggaaagcttttttatacatggcaataaatcagaaaaattacagtgaaaatattgatagaaccaaatataaaaaaattaaatttctataggagaaaatgccacatcatttgacattaaaccaaatgatacatttgaaaaaaatattacaacatatatatcaggcaaagggtcaataaacacttaagcagcccaaaaaaaggttgtttataaatcaataagaaaataaatcctacttgaatagggggattatagccttaacaaactctttctactctaaaagacatgtgaatggccaataaataagaagatatatttccaataactagtcattttaaaacacaaataaaaacagtaacaagatattctattatttttcagcagactatcaaagataaaaaaaaattgtcaataacccatgttggtgatctcacatgctgtaggtacgataagttgaaatatcaatacctttggccctgcaattacacaccaggaatttatcctaagtaaattatcattcaagtattcaattatatatatatatacacacacatatacacatacacacacacccacacacagatgctcattgaagcattgtttataataataaaacctgtccaatgatgagaaatatgttaaataaattatggtgcatctatatagtagaatactacagaaccaaattaagagggaaatatatttctatatttataaatattttatcagtatatcagtaagcagtcaagttacaaataaatatgtttactttgattctagttatgtaaaattctgtgtgtgtgtgtgtgtgtgtgtgtgtgtgtgtgtgtttatgtagagaaatgtctacaactgcaccattcaacttggtagacactggcctcatgttgctacttaaatctgaattaatttaatttcaaccaaattaaaaattgtgttagccacatttcaagtattcaatagccatgtgtatctagtggctaccatattggacagctcagatttggaatagtcccagcatcaccaaaaatttctgttgacagcactggtctggaaagatgttctccaccatgtttttaatggttgcttctggctagtgggatctggagttaatttcatttaattttctaaattgcttgaactttttatgagcatgcaattaattcatattcagaaggttctgtcatctggaaaaaactcacctatgattccaccatgtagaaataagcattgttaatattatgttgtatttccttgcagtctttgttctaaatgctcatagttgcacagaatgacaatatgtacatgtttttaatgttgtatttatatctaatacaccataagcattgtatcttattctttaaagctcttcataaacattactttaaaaagctgcatactgttctgtctaatgtccttaaatgatttttgttatatatgttgccttgaatgtactaaaatatttaagaattttgcaaatcagttgggtttgggaaaatcaaatttatagggaagacagtgatttatagttcttttgttatatgtagaggaccatctaatacatcacgctttggagatgctttttttgttccaaatcactattcaaaaccaccttcacaaaacataatagctttagaaatcaatgtttttgataaagtgcctttattttcaagtatccactttccctactgaatgcaacaatgcacagacatctttgttattatccaccttctgagatttatccaaaatgtgtcacctctctttgaatccctttagaaaccattctttgatgaacatactttatttggctctcctggacaacattttgataaatataaaatgactttaacacaagaatcaaagggaaaaaaatttcagaattaaagaacaatgacctgaaatccatggaagaggagcacgtgtaacaaatttacttgacatcttgctctgcaagttgcttttgctgtatttgaacttctctccggaataaaactgaaatcaggggctttgtgttctataccataccctggtacataaaacctttccaattacatttatgttctcctaggagggatggccccaaaggcacctcagactttgcatatcaaaaaccaaactcataatcataatcataccctgtactcctccccaacagggtccttctccagatctccctgcctctcttgactacaactcctttctctcagttacgcagttcagaaaccgagggttgttactgacacctccatttcttcaaccccaaaactgaatccaacatcaagtcaagctgattttgcctcttacatatctctccaaatctgtcccccatattctagcaagtcacattccatccttcccccgtttaaagccatttggtggcttccccttgcttgagggcttagaatgccttgacaagaacaaaccttacttccttgcagaatctggctccttacctatacagcttcatttcacccaaccttctctactagcttttaattttctcatccttgctgctcttcctcctaccacaagaaatttgcataacatgctactccactgcctgaagtgcttcttactaaaccctccttcatctaagactcttctccatctttcaaatttcaactcatcatatgcttgtttagggaagccctctctgatttcattaattatgttagactcacctactaaactcttttgcacacattaatgaggctgtttgattaatttaatgcccgtttccttgccagaatgtaagcaccaccagggtgtaagcatctgtttttgttcactgatgtagctccattaactagcacagtgccagataaatagtaggtgctcaataaatatttgtttactggatgaataaagaccatgagacagatgcccccaagcacaaggaaaatgctgagtcttctacaaaagaatcttggagcactggtcaacagcagagcctctctaaagaaacagattcccccatgaggagaaagctgcataagtcatcaaactttatagtgaaatatcctaattacatttccctttgagttggactgtactgtatgtactgcactcagtattccccaagaatagtttgtatctgagatatagagcccaggaggctaggcccaacaggactattcttggggaatactcagagtggattctatttatgtatcccagagaaggcctaaggagagagatcttgaaagcattcatgatgcaatctcctgctgggaagaagaaagccagatgggagctaaaaattgatgccaataagagatttggagcaatgctgttcaaactgaggccttttcctgtttcccaggagcatagagtcatccttctactaagttttaagacttacagaccacctgtaaatgtaactggcagtgtgctgaagccagcttgtaccagttcatgagagccaattgttaaatgtttgctaaatttgctacagattgatacacacagccattatgataaattaaataatttaaacttaaagctaaataaattatactaaaaatgcaggtaatgaatactcaaaactcatcactttctaattattttattaaatgttatgattaagtatgattttgaggctatttatagtcttgtagctctatggtgaaattgtgtgctacttgatctttttttcaattctgaattcagtgagatcatcagggtggcttgaaattggctatgttgggagtatttacaccatggaaaacagtaaatgctaacattcggggatttggaggcttttgttgttgttgttttgggttttttggttttgttatttattgtttgttttgatttgttaaaagcctgttgttgaacatttaccggcataccacaagaggcaaccaattcatggcccaatgtaatctgtctttttgtacttcattgttgaaattacctagcaatactaggaaatcttaggtcgaagtggaattgtgaatcttccaatcgtctaaaccacatttcttctaaactacatttcacaaaaacatattgggtgggactcgtttgagaaaaaaaggttatatatatatctttttaatcccatatcatatactgctattttttaagtacctaagatagtgtttggtataaattaaccatatagaaaatatttgaataaattaattataggagtcaagaagtataataatttgagttaattcttgacaataggatgatttgaattctcttcatataaaatgggtggcattataattcatttcaaaatatttcatgcattaaatatcttcttaggaagatgcaagaacacttgacttcccagttttcaaaggattttaaaaatcctctgggaaaatattggttggggagagaaatgatggctgtgaagagggagatgaagagaaaaatgtgaaaaaagtgaacgagatttgagaacaaaaggaaaaaataattgcctaaaaattaatcagtgcaggccaacaactaaaagaagtgactaatgtcctgggaatatttactgcttttttgtaaaatttttttaaaattaagagagctttacactccttaaatttcctttctattccctatttagaattgtactggctgggtgcagtgtgtcacacctgtaatcccaacaccttaggcaggcagaggtgggaagatagcttgagcccagtggttcaagccctgcctgagcaacacagtgagaccccattttccacaaaaaggaaaaaaaaaaagttagaattgcactaacaattctggtgatagcttttacaatcatataacataactaacaatagacacaatcacataactcacaagacaatttttttcttattgaaaattgaggtcttagagatgacaactttggtcttcatgtataatgtgttttgatggatcaatagtaaggcattttagaagacattttcttactttcacctcaaaagaagcacacacacacacacaaaggcatattgaagacggggcttatttaaatgcaactagttattccttataaaagtagacatcaaaccttatcaaggctttgaattgttaagatctttatatccctgtgtttctgatggtatattattgatttttatgtattatagaatatagttaacccatgtgtatctagagtaacacaaaaggtatataaataaaacaaaggaaataaatctgaaaatcaaatagtatttactcttagaatatttttataactttcagcaaatacgtattcacatctatatttagctttatagataaattacccatttacttcaaactccttcagttacctgtagtgaactggtgggaaattttctcgctccttttaactcctacaatcatttataattttaagaagaaaaagaggccgggtgcggtggctcatgcctgggaagctgaggcagatggatcatgaggtcaggagtttgagaccagcctgaccaacatggtgaaaccccgtctctactaaaaatacaaaaattagccgggcgtggtggcatgtgcctgtaatcccagctactcaggaggctgaggcaggagaattgcttgaatccgggaggcggaggttgcagtgagccaagattgcaccacggcactccagcctgggcgacagagcaagactctgtctaaaaagaaaaaaaaaaagaaaaaaagaaaaagataagtatcagctaacatttatttcactgcattttttcatagcattcttaaaataagtaatcatgtcagactccacaaaaatgtattaattctttatgtacatgtgatacattagagtttgaggatttaattttgatcaccacactaatgatataaggtgaacagacattgctattatcattgttaaagctttgagaatatgagttgcctaatttacaaagctagttaaatggaagaaccaggaactgaaaagatctagaaatgacttgtcctttagcactctttaaattaagcttcccatggaaaaatgaattaagggaaaaacaaaattaaagtgcaaatgtttagaatataggtagtcaagtatacacaaaccatgaatatattcctaaatgtgcacacaaatatacatactgatcgacaaatctcaaagtaagtaaatggatatacatacatatactaaaatgttcttgtctctataagagattaaagtattcagtatgttccccccatattgtgtttcattttcatttgtagaacttttcagtgtctggttcttccatttaactagctttgaaaattaggcaacttgtattccctgagcttcaacttagttttccctcaaggtggatgataatagcaatgcctggtcaccttacagcattagtgtggtgatcaaaatcaaatctgcaaactctaatgtgtcacatgtacataaagaattaatatatttttgtggtgactgacatgattgattacttattttaagtatactaccagctattaattttttttcaagtactcacaacttgttatgtgcggctctcagcccttaacatataatgattcatttatttcccataataacctttttaaggggacactactattatcctcatcccacagtttggaaaactgaggcacagaatgattaacaaaattttttaagttcacatttcttcaaacgacagagccggaactcaaagccagacagaatgcaggctgtctggctgggcacggtggctcacacttgcaatcctagcattctgggaggcagagatggacagatcacttgaggccaggagtttgagaccagcctggccaacatagcaaaaactcaactctactaaaaatacaaaaattagccaggtctggtggtgtgcacctgtggtcccagctatttgggggctgaggcctaagaatcgcatgagcccaggaggtagaggctgcagtgaactcagattgcaccactgcactccagcctgggtgacagagaaactctgtcccctgcccccaccaaaaaaaaaaaaaaaaaaaaaagaaaagaaaagaaacagaatacaggctgtctgctgttttcctccatgtgtcaaaagctcacagcatagatgatggattttcttaacaaagggaacatcgtgtttgtcattattaataaattgtcatcctccttttttgatatgtttgattttaaattatgctctgaggttttagaagcccctttgacacatctaactatagcacagtaccatggaaggaagtagatatcattacaaaataggaaaacttaaatctcaccaataaagaactcatcaactagggagatgctgcggactcattgtaaaagtgtctgtgcattctattaacaaacaggcgtcattatgatagctagaagcattgaccttggatgaaagttgaggggaatataatgcttttcatgctttgtcgggggtttaaacaggaaggcacataggatcctaattgtctgctttgcacacaccattacccctcagggcatgtggattttttatgcattgcagtggtaagggctgtgcatacaaattttgctggcagacaggtggtagcatatgtcaaaaagactggggggatagtttaaaacatggctgaaaagttgtctatactttagaatttttaagtttgacaaatactgactcaatgaggaggaaaaagctaactactttttccattgactagttttcaaattgctatagttcatgcacttttattttcagcaaggatgattgtacaaataatgattaaaattgaccatttagcttcgactctttgctaggaaggcaagcacttccatgagaccacctttctttcctattttgatttctcatatgcattattttatatttttaacaaactgcctaaaatatcgctaaacaaggtaacttgaatgagtgctatttaagttttattctgccaattgaactatttgcactattttatataaactgcatcaaattggatatactttgtaacacggtgtgatatggagagggcttagagtttaccatcaggtgtacttggattcaaatctccctttacaccattttataaaactgagcaaattacttcatctttcagcacctcatgtgaaattggaataacaatagctatttctctgtgttagtttgcagattaaataggtggaagaagatacagaacagctggtgtggtagttgacacagtcactaattagaagaacttgttgttatatgtatcatttttatagagaactgaacagagtcagcactttgggaggccgaggcaggcggatcacgaggtcaagagatggagaccaccctagccaacatggtgaaaccgtctctactcaaaatacaaatttagggggtggttggtggcgcgtgcctgtagtcccagctactcgggaggctgaggcaggagaatcgcttgaaccagggaggaagaggttgcagtgagccaagatcacgccactgcattccagcctggtgacagagcaagactctgcctcaggaaaaaaaaaaaaaaagaatcttagtagcctatctgatgaaattctttcaattatagatcccatagaatacatgaagattaatcaatattgagataacatttccttatttcctataatcacttctttaatgttgtaacaggtgtattcaatccattgatattctattggctcactcacagaggttacctaaagagagttcccatatagtcctaagaatgttttccggctatggaaatgcaagagagcacaccaggaatgactgtccaccagtgatggatgagactgaacagataaatgctgcagtttccaggctacttagggacatcctaagatgtgttcttcattctgtctccaaatggcactagtgttttgagcctcagttgcccaaaatggtaaaccgctaaattaacacagtctttaaagaccttcttccctccttgtcttacttccccactcctcactgtgctttctgcaatcatctccaaaataaattacttgtcctcagatctttgacttgggtcagcttctggggcatccagacaaagatcctgtctgccaagcatgtgtattgcaacctgggaaactattagattggtgcaaaagtaattggggttttgccattacttttgcaccaacctaatagctcaggcaatgcaactttttgaaataggtaatagcagcattttcccagctctgaagctgtctctccacattctgagcccaattttcttggtccaaggactgtggatactttatttcaatcccattttctgcttcttctatggtcagcctgcctgaatgccctccagcagccccttatctttccttccttcctagctctcgaaactgcattaaaccagaccctgagcttgttcctggagatgaggaaaatctaggatgctatttagggatgctcctttaactttatttatctcttctctctgactgcttccaagaacaaccaaacttttagctccatgggaactccagggaacttttagcttctctgtttgtgaaccaggagaatattatctggatgatcgccttcgtgtttcttctaatttttttttgttttagacttaaatagtgtgttcactttagctcaatcaattcaagcctgacagcttcaaaccgctttatttcagatgaagatgcatggctaagctaattatattttctcttcttcatcaacagttttctatacttatacagtgactttataaattcatcattattccatcccaaaacaaatatgaatactcttgttatggtaatgccactgcgggatatgaaagggcagtcctctaccagctcgtttttttcctagtatgtacccatagttgcttttctttgacatagtcagtctgttctccttctactccctctagttaaaaaaaaatagctaaaaaatatttaaagattttccatctgttacttgtgggaaagaaatacttaaacaagtaacatcctccgagtcttttgctctatttagaagaatattcacagcaccatatttcagagccatcattgatgcaagtggataggtgtttcctctataaaggcttgctggctgtgtgagccgcctaagccactggtacaccctggtgaacagaatgatagccttcatcacactcatatataaaagaaagaaaccttgaaaatgagaggtatgaggataagcattgattcaaggggaatttgttagtctgtgttttattttctgagatgcaaatgttgaattcaagggtttgatgggaaaccagcctggacgtaaatttatacatttcctccacaatgaaatttgaataaagcatagcaagtcggctctgccttcaaagaaaaggtagctttatcactatgaagctgaatcacacgaatctcacttaagtataaggaatccatctctttcatttccaactgttgtactgagtgctactggaaagcctcttatatgcttgatgattgataggaatggatttgagttccatccatataactgtaattcagattgagaatattgcattaagtgcagggaatcaaattaacctacacaaatcattggataagcctacaatccaataaagatacatttcatgagtatgaaaaaatgagtaaggtatatcttctgcacgaaaaatgtttctggtatcaaaaataaaatctaaaggtcatgaagagatgttttattttgtagatacttggcatgcaaataaaataacctttttaaaaagtggtattaaaaagtaaggattcaaaccagcatttaactctttttttaaatcatcctttagcctgtgtttattccttccattaattttgaatattttaaatgatataatgcagtaacacatgctgtaattgagtccttgcttcttaggtgtagaacagtctttactttcttcagtggccaattacctgaaaatgggaatcattaacatgagctttaacaagagcaaaactcaactttctttgcaacagacatgaagtaatttaatcacaaatcctgatgattgagagaaaatgaatttacttagtcagacagtctttatttggtagcacttatgggaacagaaatgatctagatttaactttaaaagtggaattcaattatagctgccaggattctgagttggtctggttaatttcagctgtggagatacatctaggatattctgcaggtatttacctacttgagtaggtaaatccttctctggaaacttcttaggaagttgagtctataagaaatactcagacataaagctccttggtagaataggtttgggagataaggtggtttgcatgcaagttgtctatcagtttgtgttattgttgctattttgattttatttgtttgtttctgaaacacagccacccatttcccaagaactgagaatgtcatactctggaaaacaaccactttttacacatctgttttcatcaaattccttctacctataaagtcctctaaaaacttgatgcatttgcagtttgtccgtccagacaatcccctctttgtgtattctctgaaagtctgaaaacaactgaggacaacttgaaggtacaagtgtctttctcggtctaccccttgcgtatcaatatgctcaacaaagagctgcattcaaaaatagatacgttattgagtacaggtcaaataaagagtgaacttgtttcttaaaggagaattctaacataatcaaggttagtgttgataaaaatgaaataaatgaagaaaagatacagttttaaagataaaatgaccagtgctggaaaagaaagcaaagcatagtttaaatcaatgtgctccatcaccgaaaaaggacgttagtaagaaacttggcttgttacatactttaaattctctgtttacattcagaactatatggttttaaaatattgtggtttcttctgagtaagtgtttctcaaatctaagtgttcctttagttcatacacagaaacctttttaaatttttttttcccaaatgttaaccatccagatgtagaatcatgtggtgagtcctcaaatacttacccttcagattcaatcagcagcatcattttaccagcctgtttcatccacctaattccagacatcacttctaaatacttcattataaatttctaattatataaagaccaatagtcttttaaaaaatataaaacacctgtaatcccagcactttgggaggctgaggtaggtgcattagctgaggtcaggagttcgagatcagcctggccaacatggagaaatcccgtctccactaaaaatacaaaacttagccgggcgtggtggcacacccctatagtcccagctactcgggaggctgaggcaggagaatcgcttgaacccaggaggtggaggttgcagtgagctgagatcacaccactgcacaccagcctgagcaacaaagcaagactccatctcaaaaaaaaaaaaaaaagaaaagatatatgagcaacaattactggggaaacttttcaaacaaagatttcagagagttggtcatgtttcttataaattcttagtggaaatcccagaagctcttttccagaattgttttctactctgagcacctactctgggtggtctttacttgcctcgagttcctttatcttaaggatgattcaagagaatccctgacccccaaacctagtatctgcaattctgagaggtggcgatctttaaccaatcatctgtttatcaagttttgagcaaaagtattttgaatggacatgagaattaggcagtaaaataatgtagactgaacaaaaaatgcttgggggagaaaaaagccggagaatgagttgtgtggctatcactggaaggaaagaaagggtccaatgtatagatctgattcatctccaaatattttcccactaaagactgtggaagtaaatatattgatggactctgtaatcactgatttaaaacgtgtgatttataattacaagtttcaggtgatttctgagaatgctttttctcttctgagtgtaccaaaaagaaccccacaaaattacaagtactaatatgttttctctttgaaccttgtctcaatggtgttcaaaaactttgatgcaattaatcaattcataaaacaccttgttatcaagtttaattagccttcacaaaacattcattcttcccgaacattctcctttaatctttcgttaatggtagagtgctaaatgtttcccttttttgctattattgtttatttaataaaacttttgatatagacctctccttttctgggtcatgcaaattgatgttttagtgatagcatttgatctttctaggaggcttgatgtacttgataaggtttcaacttgttagtgaaagtgagatttcagttatattaggcagagctttgaaatggggttttctttcttcataactttcctgaaaaggtgacttttcatgcagccaaacagagaaagttttattaactaaagagagaattaatggcaccaagtaaagtaactcagctggaaaggttttgtttgttttctttcttggttgtgtgtggtttatttaaacatctactatttttttaaacatctactatttagattttttttaaacatctactatttcttcataaggatgctgtatatcaaaacctccaaaaaggtcagaatagccagtctaagtaatcaggacctgttggcccagtatttagctaaataaataagaatgtaagtgtactcctggctcagaagctggccagcaaatttgctaagtgattgatttgatgctaattttctgcatggacttctcatttccttcagggcctgtcctatgggaggaaataacttcagccaagctgactgagccctattttaggtttcactttgagctttgaatgtttggaaaactccctttcccagcaggactacatctccaaaggatttccatttatgatgacccaaagaatgcaacttgctctaaaaagactgcagaagttccctatgtccaaatcccagtacattccgaggacagaactgaaatcaacatatgcatggcaggcactacgattttgctcacgctaattctgtgtctctttgcatcagtactgactgttggagcaggtctacgctgagagccagggctgtgtttcttccctagtcctacgtaggcattgtcatattttaatttcagaataaccaccttctttgtcttagtgcattcaggaattaaggagaagaatagagatttttcattgcaatacacaatttatgggatgattgaaggaaatagagaaccatgacacataaaaatgtgtgataggatcacagaaagagcacttaactgcaggctatagtcttgagccagaaattgtctctccactacctctgggcaagttgcttcatctctctaggccatttgtggaatgggagccttaaactcctacaattttctagtaagaataaaagcaactttgttttgaaatcattctaactcaacagaagttgaagttatgctatcacgttggaatctctagttatagactaattattttcaatatttattacccaggaccccaaattacgtgaacttttggatgtggggaacatcgggcgcctggagcagcgcatgatcacagtggtgtatgggcctgacctcgtgaacatctcccatttgaatctcgtggctttccaagaagaagtggccaaggtatggtggatggaaattgctaaagcttatcatcatgatctgaatccttgagctatcatactaatgcctgcaaaagactgaatttttgtcatatttagcatgtgttaaaatttcacctaaaaataattcagctgccaagtataagtgcaattaaaatacttctaaataatggcatcaacttaagaattatggagatttttttcataaagaataagccatttggccgggcacggtggctcatgcctataatcccagcactttgggaggccgaggcggacagatcacttgaggtcaggagtttgagatgagcctggccaacatggtgaatccctgtctctactaaaaatacaaaattagctgggtgtggtggcgggcacctctaatcccagctaattgggaggctaaggcaggagaatcgcttgaacccaggaggtggaggttgcagtgagccaagatttgccactgcactccagcctgggtgacagagtgagactgtatctcaaaaaaaaaaaataaataaataaagagaataaggcatttgatatagtttctttgcataacaaaatacaaataaaaccacattctatttcatctaaacactttctcccaagtcattctctcttagcctcatccctatgccacttctaagtccgtgtcatttccagctctctcctaggggacagacatcttcagccctctttaaacttcttaatccctgggcagcaactagcccaccataatccatgtagtagttactcagttaatatgtagactaatgaaaaactaacagtttaaaataaaaattttagataataatgaaaataatattaagtaagaacaaataatatttattcaattacggattagaaagatgaattagatatggcccacccactgaggagctgccatttcactaggagcaagcctttcagatatttacaaaaatagctagaaaacaggtataatgtagcaaacaagaagctgtgaacatctaggacccctggattcaagtgcaatgctttctctagaaacgtccaattgtcattgaaagaatactgaaatgaacatatttaaagaagagctttctttttccatttttatagtttataaaatactagtgatagtccttctccttcatataacttccttcaagagttgagaatatgaatctaagaaaactttgagttctgcatataatatatgtgccttacagagcttctcatgtcatgcatcacaactacagggtcacttcatgtcagtgtgcattgtctaagtattgtgatctacaattttttaaccctcagtgctctggtgattttctgagctacaccagatgtgttggcctggttcctttctttcttttctttcttttctttcttttctttctttctttctttctttctttctttctttctttctttctctctctttcttttctttctttctttctctttcctttctttcctctcttctttcctttctttctctctttcttttctttctttcttctttctttctttctttctttctttctttctttctttctttctttctctttcttctttcctttctttcctctcttctttcctttctttcctttctttctttttctctctctctctttcttgtttttttttttgatggagtctcactctgtcgccaggttggagtgcaggtagtggctcctgcactccacttggctcacttcaacctctgcctcctgggttcaagccattctcctgcctcagcctgccgaatagctgggactacaggcgcatgccaccatgcccagctaatttttgtgtttttagtagagacggggtttcaccatattgaccaggatggtcttgattgtcctggtttctgtgtcattagtgattattggcagggatttatttctaacacttatgtaatattgactttaattcttataatgggatgcataaaatgccaaccagttttaatattctaatgtctttagaaactactctttccaagtatgttgtaaacagaatctactttctctctttataagccaagttacccatttatttctatagtatcatttatacttggagagatttcagttcaatgaacattgtctgtgtgacatatactttattttgctgtatatgaatggatagttggatggataaattaatacagaaaaaacagattctaagtgtttgcaaaatatttttaaaatatgtttccccaaatgaactatattccttttataaaaagtgaccaatttatgggatgcactaaatctcaattaaaaacatgcaataaatggcagtggctttcagggaagcttttgctaagagtaaatatatttatattacacatcaatctgcatatcttaagttgcattaagcctttgtgcagtcctatctaaaatatatttaatttcctcttctctgtgggttcctagccactaattttccttagggatttttatctccaatccctgtaatattccctctcaggagtgcatctgtagagattttcccaggggctacttgatgttcccagtataattaatgaagctatggagaatattttgccttccctggctgtgatgttctatagagtattttcccccacactgaaagtgctcagccagaaacttaagatttgcaagtaccactgttaccttggagcatcacgtatcacagtcacacagggagcctgttaaaacacagattgttgggccccagccccagcaggtctgggatggagcctgagcatcttcatttctaactggtcccaggtgatgctaatgctgctggtccaggcaccacactttgacaatctcttccttagagaagcttgggcacagtgttgccagatcttgaattttcttctaaaaggagctgcaaaatccatgaaaggtgttaaatattggcaacagttgtttaaaaacaccatgtgaaccaaaaaaacattaactatggtctgagtaagacttgggagcttccatttggcagctttttggtctagattcacattaagtaagaaaaacattgtgctaaataaaacctcaggtcctgaccactgaatacaatgggggaagcacgtaacattatcttgcagagcagaatcagcactctccaccacatttgttcattctctaacttccaaaccattcctagagccctctgggtgcctaagaaatgtgaccttttagcacagcatttttcagtagacagagaaccatctgcccccttaatggtcattgtggaaatttttcagaagttttataataggccacttttttgtgacttagattggatcctattcttaaccacagcatctctcatcccctataaaggaaagagagacagaataatataaaaagaaaatcttttggatgtctccaggttccatttttaaacatgtaacttgaaaattagagaataagggagacaaatcatgcctttgggccaaatttaaaagtcaagaagaacacaatcactacacaatgtccttacaacactcaacccattaattcaacaaatgaaaaccaagcaaatgagaaattactcctggaggagacaaatatgggttttttttgttttttgttttttgttttttttttttttgcctgctgaaaaaggtaagactttgttgcaaataaaatatgttcccctgaaaggccataattttgactctttttgagaaggaactaagtggcacagaactcatactcatgagttctgtaatttgggccccaggaaggaacacagtaaacgggagagagcactagagaagatgtctataaatgagaaatgttagcaatactcttctgccaaatggatatgagccttcaagcccgttgacagtttgggtacattcttcatccataaaatgaagaacttggattcgttcactcatttattcaacaacattttgttaagccttctgcaatgtgccaagtcctattctagatactggagatcaagcagtgaagaaaacagataaagacccttgccgatgtggagcatacattctagtgtgggagacacaataagtaaaataaagaagtcagccacgcagtgtattaggaagagagtgatattgacaaaaatgagatagggatggagagtgcagtggaaaagggcattaaatagggtggtcagtgtagccatctctaggaagtgacacttaagcaaagactggaaggaggtgagggaataagtcaggaggatgtctggagagacagcactgcgcttgcactacagcaggtgcaaaagccctgaggcaaaagatagtctggtgtactttaggaacagccaagggcaagcgtgacagcagctgggtaagcaagattgagggaaggtagtagcagagggaactgaggaggcaactgcaactgattttgctgtaggatggcataggcttttgaaggactttggcttttactgtgagtgagatggaagccccgagagggtttcagctgaggacagatgtgatttgacttaacatttaatccataatggaccgcatgggggaggggaaataatggaagcaagcagattcgttaccaaactattgaaatatttaggtgagttgctaatgacttagaccaacgtggaatgtggaggaaataaaaaggaatccaaatttgcatgtatgtacacacacacacacacacacacacacacacacacacacacatattataaagaaggaagtgatggcatgtgtttatggattttatgttgcatgtgaaagaaagatgcatggaatcaaagacgatgttaaagttctggcccaagaggaaaagatagaaatatcatttactgacatagggaaaatataaaatagaatataattttttgtttagaagtatatagcagaagttcagttttggttacgttcagtttgagattattattaaatactcaattgggtgattttgagtaggtagttggatatatgagcctggaggtgagtgccaaatataacacgtaaatttgggggtcattgggtatttgattgtattaaaaagtcatcatactttttaatgaagctggatgagatcagccaggaagtgactgtagatagagatgtccaagggctgaatcatggacagtccaacataaaaagaatcagaaaaacagaagctgagaggaggcagccagttaatgccatgctcatgggaactgagccagattatttaatgttttactgaaatgtagcatacacagaaaagtgcacagtttcttactccataccctgatggagttttgaaaaaggaatatatccacctaatcaacatccagatcaagaaacagagcataaccagcaccctagatatccaccctactaacacctctatatcggcagttaacatgatagattagtcttacctgtttttaaaatatctgtaaatgaaatcatacaataaagtctttttggtctgacttctattattcaacattatattatgagatttatgagattcttctatattttctgtgtaattgtagtttgtccattctctttgctaagtagtagccagtaatttacttacagttcatgggcattcttgtagttgtaagtttagggctgctacaaataatgatgctgcaaacatctgcctttcagagagctagatattggagtgtaatgactggtcatagatctttgtgtgtactgctttgatagatactgtccttttctcaaacttgttgagccattttgattttttaatattatttcacacataaaagaaaaatttatcagaggatctctgtaggttaaattattacattttgaagtagctgtcatgtcacagaagaaatgcgctctctaaaaatatgttatataaagtgaacattagtctttaatgtttgtaattttagattcttccccctctgtagctgtgagtatcttggagagtctaattcacttatttcaaggatatgagtgagattttctggaagttttcgttaacttcgtctatatcagtttcttgtgcacaatctagataacacaccagctctctgaatttcctaactagctctcacatctctttcctgctccccattcttcctgccatcttgttaagcccttgacaggtctcatggatagtcattacctacctatttcctgaaattctctcacactttgctctacaaatctgcctgctcatctgcataagaatggccttttaaaacaacaaactcattcctgatcatattttaaatcattttcattctctattacctgcaaaatgaagtttctgtgcatttagtgaacaaacatttattgagggcctagtatgtgccaagcacctcgctgggcactgaggattcatcagtgacccaacatagtccctaccctcaggtactgatgatccaccactttgactgttgcaccattctgttctagcagctcctaactacttgtgattcttctacctttacaattgtaatattaatgcctttataatatggtagtttcctagactgcctttctctcttttgtccaccaagaaaagtcctaggcctcccgagggactcagcatcaactcagttcatccatctctcgctctatctcatgacttccatgcatagcccattgttctttcatctgttgttctgtgaaccttgaacatattttcaattacagtcattacactgtaattatcaatcagtgtgtcttataatctatcctgtatttgcgagctgatgaaagtcaaaaacagtagtttagtctgttttgtgttcccaggatctagcttagtgcttggctcaataaatgcgagaggtgtgagagaggaaaggaagggaaaggaaaggaaggaaaggggaaggagaagggaaaggaaaaggaaaaggaaaaggggaggcttttgaactcttgaaaataagtgataggtcacgtacaatcttagagtcatagtggcttttaacaccatgtgctgcaatcttttcatttagagttgggagaaattaaggccccttagcagattggttgcttaaggcttttcctagaataattctctctccagcttgccaggattctcagtaggaggacccaggtggcattcattacgatggcttccattttcctaatcttttttcccaaagctaaccttattcccactcagagttactgtgactgtcacttccctacccagcagttactccacgctttcttaagcaaatgaaaaatagcttctatttaccaaatagttgacacctttcaggataaggaaatgagagaagatgtcacggagaggggaatttcttttaagcaaaagaaattatagtctatgggataaaggtgggaaatagaaaagaaagagggacaagtgaagggttctgctaaggccacctccgggccattcatcaaaaacttcaggaattttcttagagttgccctaaaataatagtattagctatttaaaagtgacctcaagagacatgaggttcttatatttatttttattctgggaacatgtgcattgaggtaagaattttgaaacacttgcgtatattctgtacaaaatgtgcgctttatctcgtttctattttgaatttcaaacaaatttatgatgagtaagcagtagctgtaagtttgactttaaatgaaaaatgattaagaaaaaagaaaaggtggtgccataaattgtgttcagcaatttgttttgggacataatggaaaactgtgcatgacttccttgcaggtagaatacatgtgccaaaaagatcactgtttgcaaacatgaaaagttagatccatgttattgtgttttgtgagatcatcattacctgctattcctgaccttattatattaaaaaaaatgcctgtgtcatcttaggctattcttccacccaatcataaaaaggaccaaattcttactgtgtcaatacattgcactatttgtcttggaattttatactggtaggtgtcctttgttggagaatgagatttactctacattctgcacattttggatatgtgtcaggcaaatgaaggatgcacaacttaaacttttatattgtgaaaacatcgtctatctggaacatttgtttaaaagctcataagtcaaaagaaagacattcgtattaaaaagatttttattaaaaaaggggcaacttggatttcagtctctcccttacacacacagaagcagcagcaattgctattctggtgactgtggaagaaagcacccctgccttctgtctcctgggtgtcttttctgcatttgctagacaagaacttttttggagccagagagtgctcaatggtgcccacataaaaacaattaatgtcaaactgaagggaaaatgtcaacgctgagacatagaaatgactgtgatttcagactgtgggttactgttagtacaagcccacctctcccctgaaagagaaaacagaaaactgcatcagcaatagcatctcttctttccttccatccactccattgcagagacaagctactcttctgcatacctccatctgcctaccttctgatgcctggcagctaagtaagccctgattgcattaccggtgtgcctagcctggaagcaagaacatgagcaccacaaaaaaaaaaaaaaaatcaccgtgactttttggaaggaagaggagttctaagaaaatctggcttccttgtttaaatttctccctccacatataaaatattggtgttggcaggggaatactgacatactttgagaaaggcaggttgatctgtttcacctactaccttgatattggttgtcatctttagtagttaagccaaatgatgcccaatgaaaagctggcactaaggattaaaaatactttttgaaaataccttgctagtaattttcctgataactatattataattttcattcattcaacaaatatttacaggcataatcagccaatgaaaaggtgaaatcagaagagggaaattaaggaagatattacaagaaaatatctgagagctaaacaaaagtactggtcttaaagtctaaatagcaagtacaggaatggagtagattcaggtaatgagtaggaaactggaagatgacagataaatgaaaaagacttaatttttttctctccaaaaaaaagttaaagtagaagggtggggataaatgtaccagaaatgtattatccaaatataaaccatgctaaaacatgtaagattttcaaaaactgaaaaaagaacttaaaaagataaatatatacttgttattaggaatgttcccttcggaaagccatgtgggttatggtgttggaactgaaacaaataatctgatatattctaatatatggcctagcagaaaattatagttgcaatttcatactcatgtaaatttttattatatttgttttaaactttcagaatcaatttatatgcaaataaagtcataattatgaatgcggaacaagataaaaactgaccatttattttatttattgatttatttttgagacggagtctcgctctgtcgcccaggctggagtgcagtggcgccatctcggctcactgcaagctctgcctcctgggctcacccgccattctcctgcctcagcctcccgagtagctgggactacaggcacccgccaccatgcccggctaatttttgtatttttagtagagacggggtttcaccatgttagccaagatggtctcgatctcctgacctcacaatccgcccacctcggcctcccaaagtgctgggattacaggcgtgagccaccgcacccagccaaaaactgacaatttaaaagtgagtttaagctaacgagagttggaagtaaaaggaatggcaggtaaatgtcctcctatcataaaggagccaagggatactatttttaatgagtggatcaagagagtttgagtatgttgcttgagattgtagaggtgacagggaggaaagggcacaagtgatagaactctatcacaagcaaggagaaagggcaggtgagagatggaatcagagatttaaagcctcctcaatcagagcaggatattatagtcaaattctaaaatcagtcaaggaaaaacattatacacgcacacacgcacacacacatgaaaaaagcattacacacccatatatataaatagaaatgtgtaagtaaaccccagaaatttaagaatagaaatgctgaaaatagttgtcaagaaacagaactaggacgtagaagtgatcattgcctttccaacccctctgaacaacttttaagaaactctgtctctgtttcatcgataaataatagttttttaggttactatcatttaacaagcatatattacacctgtcactggtctaacatgaattatcccaattctctcaaaagccctatgaaataaattctattattgcttccattttataagatatatgaatattggaggacaaatttaaaaagacttgtccaacatgattctgtctttgcatttggcctggagtaacagaaaaccaaatcaaacaatagctgagacaaattaaggatttttaatttgtgttttgttcagtttttcttttcttttctttttttctcatgtagccggaaccctgaaggtagtgttgtgggtgccactgcctggggtgggcattgtgggtggtaagagaatttaccaagacagtgataggtaaagaaaggcagatttattagagaaagtttgaagatatgttgcaaaggtgcagtgggcagcacagcagagaaggggctgtctgcaaagaggcagggattggagggaagtttcatagggtcatgatggaggggttatgtgcagaatgaggtcatgcttctggagttactgggactacgtgctgaaggagctatttgggaacagagtgttgtgccagcgggttgtctgtgattagccatctcagattgttctccccaacctagggccctttcctcattgttgcttacttatcttattaggactccacaggtggtttctggcactgattcaggagctcagggataacaaggctgagtgaggcccctatgattctcgtggcctttttctcatagatcgagatgcctctgtagctctagcctttccatttacattccctacagtaaaaggaaaagagatctatatcaggaaacacattttcccagaaccctccagcaggcatctgcttacatgtgatttgccatgtggcacatgttggtcacccagctgctaaggacattggaaaatggatatttttttttcagttgaacatattattggcctgagcactgttgggcctctgttaggcaagaaggataaaatagatatgagatagcatttggcagaaggtcccagctagaaaatggtagaattgtgttctgaaatccaataaattataaccatgataagctagaacaaggatctgcaatatgaaagtcaggaagagccattaaataaactgatatcaatattttacttttaaattagaagacaagaaaaaaaaaaaaaactgtgtttaagagtcactattccaaggccttcacaggcagtgagaatggtcaaagatggaacaatcaaggccaaagacaaagaatcgttcttatagcagaggaagaactaacgggattgagttaccaagggcaaaataccctcttcatttgaagagaagaatctagcttgcaaaaaggtttaaaataaagttggaaggtataattaaggtaatttaaaacaaatttatttccaaatgagaaaattatatttcagcagaattctgtcattaaattataagttaatgaggaactacctgtgcctcgttcactaatcagttttcaagtaatgcagttttaagattgtcgaactgctttcataataagcagataagcagcatgcttaatgcccaagaattgcgattgctcccctttttctgtttcacatacatcttactaaggaaattagcagtgcttttttcttttaaaatccttttttatgtgatctcttcaaatggaattatttttgtaatgaacaacgatatcaattataattacagaccccgcttacatttattgtctatggtacacagcaccgaggcagatacaaccaaagtaataattaacactgagactgctaggattcaaaggcataatagcaagtgttttcataagaatgacatgagactgttggaagaatcatttcaggaatgtgagggattgacatgaaatccacaaaaatgaaactttgggggttctgtatatgagcacacaattagcattttctcagttgtacaaatgaataatgactcaggaaactaggaggagggaagggaggaggtctccccagtggatgctaagaatacacctgagactcccagtgatacagctgcagtcgtctcattgtgaaaacttcaacagaaacaaacatctctccgttcttctactctgtgccatggacgttgctctttgggggagttttaatttttcccgtggaagaattttctttaagttcattttcatttcatttcaccacgttaaacttttcccatttggcagaggaatgtcaagaggactgggacatactagaactggcagcctgaactcttccttagagtatcaggataccatttagaagaatattgcttcacttacctgaaaaaaagatacttgaacaacagttcttcagaatacagcccaaaacatcaaccaaagcataataagtatgtctacatagccaacatagatgcccaaacccttacacaaaagcttctgtactttattaattggagagcttgctagtcccatgttatatccaggactcctaatgtttgtaaactattccagtatagttcacattacaacagaaatgcataaagccagtattacaagccctctagccaagaatggttattgaaacttataacaatagaggagatataaaaattaatttcaaaagacataaatcataaagcatggaagtcagtctctttcatttacacattcacttatgcagtcaactcagtgattatgaatctattacctattttataaaaaagaatgcgaggcagaactatgagatcccacataagttatgaaacaacacacaccctttccttccgtctgctttcccacaggactcctaggtaatgggcatatgccatgtttgctatactctcccctcttctggtcattgcttccttcccagatccaattacttggttgtcgtggacactgctaggttcttacctgattgattgttcaagaggtagaccaatcagacctttcccagcattcttgttactgaaaatggaggaattagccagaccttctctggtggtgaaagataccatatgtgacaactcttggtgaagttggtggccatggggaagaacccgtcagtaaggaaaagaaaaatgccctcaggaagagagcagagtaatagcaatcaagaaagcccttttgcattcagtctccaaattcctgatgatcatgtatttattataaatgcattttttggctgcagtttgtccagtttttccttcaattacaggaaacgacccattgcacttgatactttctcctatttcttaagttagtttgagttgtgcttttgtcagatgtagcttaaagacatttgaataacatgatctgaaaataattatgcatctttccttgatttgagtaatattattatgctagttgtcctaatcatgacaatattgagtcctaatatgtttcctagctttttgttagttgggtttttttgtaattatgtatgattggcaatcatttctcttttggtataagataaaaacgagagcactttgactatgatataagatccacagagaaactataccagaattttttccaaaattctagatgttcagtatagtatcaaaagtgcagtcagttatcagatagtcctttctgattttaacaaaaggctttccagctcctgtaccatctttcaccatgaaaagattcttcactgcgtcattaagacattaaatgctcagcaggatgaattctgatgcatgccagtagtgacagaaatgtgttcagccaggtgaggcaacactgactgaatcacacaatgttcctccttactcacatcacacactgccacccccttatgagtagaggtaatcagaatgacaccattatcaatgacagcaataggagtttgccaataaataaaaaacaaatataaaatattaaaaaataggacctttacatgtctcaccaatattaaaatatcttgtttaaaattattatatgtcccagtaacttttaaatattaattcaatagaggacgagataaatagtgaaacacagagaatttttagggcaatgaaactactctgtgtagttaaatctccccaactctttctaatgctgtacctttttctggcgtgaaactagcctctggtaaacatacaaaactgtatcttgccctcagttatagatacttttaccaatgcagaaagttggcatggagctagaaatgtctaaagcttggccatgagcctacaaaatattataccagaaacatatttttgaaaccagtggttattattcttagtttaaaattatctattttaaggaaaattgatttttaatttgttagatagttactgtgaaatgctcttctgtgtcggcataaagcttggtgagcaataattttgcttctctcttgcagctattctgtactgtctttttaagtcctcctccaacatatagagttcaaggtctcagtatttctcacctggactactggactattacagcttcctaactgagttacccttctttggattctcagcctcaaatccatccttgacctggctgccagataatctgtctgatatgcagcctagccctggcatcacattttttactaatttatctccagacacctaaatgctctttatcctctgaccacaactctagtttgttgtcgcaaccccctccctcttttctaattcctattagactactttttgtttgctctaactcctgccatgttagctcacctctagttcttttcccagttttctctgctcgggattccctcttttcttccccatcactctatgttccctgctcctccagttccatcttgaatgttactgtacacatgacagcgtattatcggtgccttaagtcaggaagcaaaaaaaagacaaatcaaacaaaagtagaaacaacaaaaaaacaggtggcaaagcaattaaactaaaagacattatttcactttgggaggctgaggcgggtggatcacgaggtcgggagatcgagaccatcctggctaacatggtgaaaccccgtctctactaaaaatacaaaaaatagccctctccctctccctctccctctccctctccctctccctttccctctccctctccctctccctctttctccctctccctctccccacggtctccctctccctctctttccacggtctccctctgatgccgagccaaagctggactgtactgccgccatctcggctcactgcaacctccctgcctgattctcctgcctcagcctgcccagtgcctgcgattgcaggcgcgtgccgccacgcctgactggttttcgtatttttttggtggagacggggtttcgctgtgttggccgggctggtctccagctcctagccgcgagtgatctgccagcctcggcatcctgaggtgccgggattgcagacggagtctggttcactcagtgctcaatggtgcccaggctggagtgcagtggcgtgatctcggctcgctacaacatccacctcccagccgcctgccttggcctcccaaagtgccgagattgcagcctctgcccggccaccaccccgtctgggaagtgaggagcgtctctgcctggccgcccatcgtctgggacatgaggagcccctctgcctggctgcccagtctggaaagtgaggagcgtctctgcccggccgccatcccatctaggaagtgaggagcgcctcttcccggccgccatcccatctaggaagtgaggagcgtctctgcccggccacccatcgtctgagatgtggggagcgcctctgccccgccgccccatctgggatgtgaggagcgcctctgcccagccgcgaccccgtctgggaggtgaggagcgtctctgcccggccgccccgtctgagaagtgaggagaccctccgcccggcagccgccccgtctgagaagtgaggagcccctccgcctggcagctgccctgtctgagaagtgaggagcccctctgcccggcagccaacctgtctgggaagtgaggagcgtctccgcccggcagccgccccgtccgggagggaggtgggggggtcagccccccgccctgccagccgccccgcccgggaggtgaggggcgcctctgcccggccgcccctactgggaagtgaggggcccctctgctcggccaccaccccgtctgggaggtgtacccaacagctcattgagaacgggccaggatgacaatggcggttttgtggaatagaaaggggggaaaggtggggaaaagattgagaaatcagatggttgccctgtctgtgtagaaagaggtagacatgggagacttttcattttgttctgtactaagaaaaattcttatcctgttgatctgtaaccttacccccaaccctgtgctctctgaaacatgtgctgtgtccactcagggttaaatggattaagggcggtgcaagatgtgctttgttaaacagatgcttgaaggcagcatgctcgttaagagtcatcaccactccctaatctcaagtacccagggacataaacactgcagggtcctctgcctaggaaaaccagagacctttgttcacttgtttatctgctgaccttccctccactattgtcctatgaccctgccaaatccccctctgtgagaaacacccaagaatgatcaataaaaaaaaataaaaaaaataaagacattatttcattgaagagggagccaagtcaactacaacaatatcagatgatgacctaggtcttgtgtcatcttctcttggagaattttgtaggggtttcagcccagaatgtgttgtgtgtttcaaataatcacgcagaatggaacttctatatttttttgtagacttgctcttttccattatcttggaagcctagtgagatcattgctttctggtatgaggtagggattatgattaggagattagtgagatattgacagtgttgggagaagggagaatattgcatattatgtggccttgtgactacatggtatggagaatttctagaactgtagttaacagttaaagataccagatatagctgctttggcatgagtagtagagcaggaagattatgtttgcatgttctgctggaaacatatttgatcatattttaaatttttaatgactctttatctgtttataattcaaggaaatagtaaaatgtgcttagttattgaagggaaacagagcaattttctatttatacaaattttaaaaagcagaaaaacctttatgtacaaagaacatctcctttggaaaagagtagtctctcagggacttgaatttacttatgtcatttttacccaaaaaagggataataatacaaaacaaaacaaaaaacctttggcatgcacattgaactaatgtgtcttcctggaagccaagctaaaagcatgtgtctaatgactgtgcagtatttaagctaatgcaagtgttatttacatttttcaggaatggacaaatgaggttttcagtttggcaacaaacctgctggcccaaaacatgtccagggatgcatttctggaaaaagcgtaagtcactctaattttattgctaagggcgttgcttcttctgagtcagtttcctttctcctttgtgagtcttccgtttatgccatactgacttctcacattgataaacacaaattttcctttgggatttattagagaactgatacctcccctgttcagaattggaagacttccaagaaagattgctctttcctccaagctgcacatctgtgttacacctgggctaagttcgcatgaatgtcagtgcttttgacacacaacaaagagacacttccaaatcctggcagctgtgctcagaactaaaaattattaatttcagataatcctctgcttctacatctgtgtgtgtcctctcaattattaatctgaggaacagcatatgttcctcatttctgtagagttatagatagatgctacaatacctttcctgactacttaaatcaataggctgacatcctgattccatcccatgtagatgatcccagcaagtattagtaagaaaagagaaaggatctaaaggaaagagaagaaggaaaataaggaaagaaaagcaaaacaaattgccagatcactctggaattgccacagcccttctaaaaattgtttgaccaaggaaaataatgacttaggcaagatgagcagcaaggaaagctggttgtgttcattttggaagctgtggttggtcaggaggttaggaagtctttaaatcaaaaccacaagtagaaacattaataggtggtcctctattttgtttaacagagttctgtcttccctcttcttatgtaagacatacccatcattccagacctaatacctcagccacattcctttattttactcttctatgaattccttttgcttttagtcaatacctcaggtcttcatttaagggcttttttatgggatcgcctcctctcctgagtttgttaacttaaggactcttccttcatgcctccacctcttcccttcctttcttcctctatgtttttaccttgtctttgattttatcatccttcttctagaatatgttttccagacaatgtttctagaacattcattcttccatgaaatgttagtgaaaggggacacagaggtaaataacatgttttatctgaaacatagcatgttattgctagttggctaatcaatctctactacaaatgtctattccagaaagatgtctccctatgaatagctactatggacatgtcttttagtgaacatattgttaatatttttgttgcacacatctagctttgggattgctgggccttagcgtgtgcagcttcctgaagtagaattcccaatgtatgcatccatcaacagtgacctagagttctcattctgagaatgaatatataagcaaacaataagcaaaatatggttagttctcagaaacatgctattgagtgaaagaagccaaacacaagagtatgattccttcatgtaaggtgcaaaaacaggcaaaagtaatctatgctatttgtagtcaggataacagttccctttggcagggcgtttgggaagggcttctggaatgctgctaaagtgacaatgttctatttcttaatctgggtgccaactgtggagacttgggcagtttgtggaaattcagcaaaatgtacaaaggcatgggcttttttgagtgtattttattgttcaagaaaaaaaagcttttttaaaaaaatcaaacccttgtttttctgcttctccaacagctatactaaacttaagctgcaagtcactccagaagggcgtattcctctcaaaaagtaagctttgtgagcatttctcattattcattttattttcctcaaagatctgaatccatgccatggctctgttttgtttctccagcagcctaagtgggagtgtggaaatgcgtggtagccctgtcctccctcacacatgtctcatgtcagtgcagctgctttcctcatagacgtctccccggggcttccctttcctctggcattattttcaagaaataccaaagcaggaagtgggtggaggaagtggagggacccttgctactaaggccgaaaggccatctgagattcagatctgttctaggagtggaaattggccgacctcagtgcctctttctaccaagatggctgtagccctcaagcagggtttgcaacctcagatgctaactggagccaggcagggaatgtaaatgatgaaacaggtcaggaggaggaggaaaaactaaagagcaaaccctgtctaaaggagacaacagctcatctccaccatatatcctgtgggactggtgagcacctgacactagattgtctaatgtctttatagaacccataaacctaaattagtatattaaattgtccagtacttaagttctatttttaaatcaaattagtaacgaaaaaaagtccatctctaggtcatatccagccaaaagtctttaacttttgacttacaagctactagaaagcttctgcgaatacacaaattaagccaagcacagtggctcatgcctgtaatcccagcactttgaaaggccaaggcagaaggattgcttaaggccaggattttgagagcagcctaggcaacatagtgagactctatctttgcaaaaatttttaaaaattagccaggtgtggtggcacatgcctgtagttctaactactagggaggctgaggtgggaggatcacttgagcatgggaagtggagactgcagtaagctgggatcatgccactgcactccagcctgggcaacaatgtgagaccctgtctctaaaaaaaaaaaagaaagaaagaaagaaaagaaaagaaattaatttaaaagtaaacaaattaaaaattaaatttattaatgcaatgtacaccttggggcaatgggtagtagcagcaaggggacagaattaataaggatgtttattttagtgcttaatattagagattatttaatgcaatattttttaattgggtcagcaccataatcctaaaatattgattttatactagacaccttaattttaaaagcacgcagttgatctttcagaagacagatgcaaatgcatggaggaatggttatcttttagttctttaaatatgaataataaatagatttgactgaatggaatattttgagttggcatcatctgttagtgctgtgatccatgtgccatttaaacctctctcctttgttgtgttcacttcacagcatatatcgcttgttttcagcagatcggaagcgagttgaaactgctttagaggcttgtagtcttccatcttcaagggtgagcatgtgtgttatgctatagtttgaatgttcagcccctccaaaactcatgttgaaacttaatccccaatatgacagttttgagaggtagggcctttaagaggaaattaagagcttccatgattaatgggttaatgaattaatggattatcatcggagaggaactggtggctttataagaagagaaaaacagacctgagctagcatgttcttccccctcaccatctgattccctgtgccacctctgccaaagtggagagtccccactagcaagaagacttttgccagatgtgccctctccaccttggacttcccagcctttgtaactgtaggaaatacattttgattcctatatattatacagtttcaagtattctgctatatgcatcagaaaacagagtaagactgaaaattggtaccaagaggtggggtttttgctgataacaaatatctgaaaatgtagaagcagctttggaactgggtaatgaacagaggctgaaaaaagtttatagagctagctagaaacagccaagacttggtgaggcctcttttcactcctataaccccagtatttcaatctagaatgacccttgctttttgtagataaaaaagtcacctaatcaggtaatatttttaaaatagtcaaaaaaggctaacattatcaagatgacaatttgaaatgtggtttcaaacttattaacaataaacccttcttgatgttttttttaagatattagctaatgatagtgttgagttaggaggcgagactcaactctggtggtggggtatgaacaccggaccaaattaaggaccagctaaaacagggggagcggaagcagctttccctaagatatgtccatgtcagtttaccattgccagggcaacaccgaggaattaccaccgctttccacggtaatgatccaatgacccaaaaattgccactcctatcatagaaatttctgtattaaccaccccttaatctacatgtgattaaaagtaagtataaatacaacctcaaaactgcctgagctgctactctgagcacactgcctatggagtagccctgctctgcgggaacaggcatggagctgtaacactgctgcctcagtaaagttattttcttctaccctaccactggctcgtccttgaattctttcctgagtgaagccaagaaccctcgcaggctaagccctactttggggctttccagccctggatcagtgtgaagccgttatgtttaggaagatatttgaaatattaatttcatctcaccttagcattttaaaatgtttagttttaagatgtataagctatgtaagcaattagtatgctgctatgtgcttataaataaatatatttacatactttacagagctgtgctcagaaagtttttactgagggggtgcaggatctaaacagtttggatctaaacacctactttgctcatacggtggtaaagtaggtgagaggacaagcatgtaacatgctttcatttttatgcctgacacacacaaggtacatcatatacgttaaccacctcaaataaaataatttgctttcattttgattcatttctacatgactggctctaaaatgatttgttactattgtttctggaagtccattgcataaaatttttttctcgtgcagagctctcctttcattatttttatctgagtatctaagcaacaaggaagcctttacctaagggtaacatgactttataggaagaacctttgagcccctcaaaatgtgccagcaatgttcaagttgcactgaataagtttgcaaagccattcttagacttatgattgaattataaaagtattgagtgctatggttaaatttatcagccaattattgttgtgaagacttttcaaaacagcaaagttcattaacaactttggtgggtcacaagaaagaaataagagcacctcttcactatcacctttcttctataggtggaaaaagctaatgaggctgcgaaaagtgagcagagctgtggaaaggctcccccaaaacattttcaccttcattttataaagcaaaataaaatgcttgaacctgcttgctattgcttttttgttagatgctttggaataggaaaaatataacaattaaggtcctgtccccgacttcaacaaatatttcttgagctcttactatgtgcccataggcattgagaatatggtggtgaagaaaatgaaactcaaggtttcaaggacaatagagtcttctggggaaactagccaataagcatgccaacaaatgcgtctgtaaactgggggaagtgctataaaaagaaagactggagaactactattgagaagaagggaagctcattccagaaaaagaaaacaatgctcgcaaatccctgaggctggaaataatttccctactggatttaagcaactgagaaaagaccaccgcattcaagcataaagagaaaacatgagagatggatttgcaaagacatgcaaagaatttttttccttttgcaatcacttctgattttaccttttctggataacctctggtaaaatataataatcaaaatatttaacttatgaatctagctaagggaaagaaggaatagaaaattaaatgtatgaaccaattccccgtaaattgtaattttctaaacaactggattctgagcagtcaataaatacacattgagtaatctactatgtttattatatgttcaaactttcagaccaatgtcaactgcaggcaaatttaaaaggaaaatgagattcaaataacatgagttatgtttaaattagaaaaaattatctctaacaaattaaatgtaatgataattatctgaagttggagaaaactttaaaaaacctctatgctaaaactttgaaaaattattattcatagtaaagtataatttacttggatgacttatagaattagaatgctttttaaaaatctaaaaaccaaagactgtttcagagctaggaaataaatgtttctgtgaactgactatgatgtatcaaaactctgttttaaatctctgtgataatttcattcctacataacaatgactctagaaaatatccactaattagcaaaaaattttggccatattcacaagaggtattttaaacaagccacggaagaaaagggttatataaatcatagttggttctgcgtaaatgggagcatattttgtagccaagtcatttaagctagatttaattgtgctctgtaaatagatatattaccagaaacacagtggatgtcctgttgagatttctttttaaaacatgatattactgcacattgttggggataaataaggcacttgaacttgtatcctggctgacgtgatccactagaataacatattcctttagaagatgctactctttagaaatcacagttgctagcctgaagttaccctaattgttaaaaggtagtactgtatccaaagagagagacaaagcaattactgtccttctgttaacaacccaagcatattttccagtgagacccttgaaaactgttccgtgttcaaaaaattaccactttacccacaaactttctgagaactgaaaatagtttatttgcaccaaattcccttgatttaaggcttattaacttgaaaagagctcagtgacatctggaattgtataatagtcttgccacagcactggcatacggagttgcattttaacgaagaagatcaggaataaacccatgtatttgtttcaaataataaagtttactgtagttggtgggcacacatgtaatacaaagagaaattaattattttaaatttgaagaattgtataaattttactaaatactatgaataaaatgtataaaataacttctgtgtgtaacttattagtatgttgcctttcttctgtgccttacatcctgaatataaatcagaagcaatcacttttgtagttgtgattcttaatatgactaatatcaaaattctactttaaaaccaaattaagtattccgttcattatgagtgatttacttgtagttatttcatgtattccatggctaattcaatgttttatttatagtttcagaataaaaatattgacagtatattgaatttctgaatttactgggaaattgtccatcaacttgtcaagaaaaacaagtctatatgtggactttattcattagagtctgcttcagtgaattaatatattttaaaataacattttttctgatttttttccgaaatttaagtacccatttctcatataattattttttaaatcaagaaatatataacgaagaaaatgcagaccaccgtcccaaaactaataggaatatttagtgtactggtttacagtataaggtatagaattaagcaactcagattcaaaatatagtcattgtgacctcatcacacccatttgctcaacccaggaccttagacaagttttgtaacctcctagcacttgtgtgttcctatctataaaagtagtacagtaataatgccaactgcatagagttgatgggattacatgaaaatattcaagtaaagctcatagaactatgtttgatatactgtaaatgctaattattattctcattttgagtatttttcatatgcatatattggggggatcttgtttttatttttaatttggcatttggatatgacattaccaggtctatggaatctagaaatgcaaatgccaccagtactaccaccaagattgttaaaatcttttcccttttgagattccttgtatataagcatggtattgaaacacttccattttttcaagtttgccagtactttgcagtttctaaaataaatgggcctcattcagattactaatttagattatactagccttcttaagtcatccttcaaaaaggccaaacaacaacaagtcatcactgacagtgcgttttgtattgggtgcctgatgtgatggaccacgtcctggattaaaacagaagacccaaggtctggtatcatctcctgggttcatccagcaaacactgattaggtatctattatataccaggcaccatgctgggaacacaaaggaattaaataagagattgtcatgtcactcaaaagctcatagttcagtagaaaataagaaatataaaaaataaaggaaaagctgtgaaatggatgcaatgatgaagatagataaagggagactgtgaacacaaagaaaaagtagtgtcatgtctagctgatgtggtcaggaagggttcacggaggaatatttgaacattgggcaggatctttagagtattagaccttggatttcctcctagacaaacaggaaaaatgaatccgtgccattcacttcaccaagctgtgagattgagaaagagaaagtctgtgaattagctttgtgaatttcagtcttgtttaagatgcaaggaattagggattatccatagcttttacctaaacatctcccctatagcctttcatctcagcatttaatgatgcttacttattttaactcctctttatggaacattttttcttccattttcacctactaaccccaaagactttggggtatcctcatcagtcaagttgggcaagagaaaaatgagacaaagaaaatcagctgtattgaaatattttctttcttcaatatgctatcatccaactcgcaatgaaaataatgttgtgtttattcagattatctctttaatttgactcctcctaattcatagctggtacataaacaatgctaagattttagtaaagcatattgttctatcaaattatgtgtcaggactcttacgtaaatgatgttagttaaatttgatatttcaaaggaaataacagcacatgcgtgctcgctatccatttctccacacttctcaataaattacatccattcatttagtaaatatttatttatacctactgtatgtggcacactggaaatagagccattaacagacaagacacatatcctagctcgtgtacatctgcagattagcaaagactagacagaattgtatagctgggagcacaatacattgagtgttgaaatgtgagacatgcaaggtgtgatgtgtgcacaactggaagacaaaatccagttcaaggggaaggcaaggctttccagaaaaagaagttataaatagacgggaaggaaaagagaggtcagtaagtgaaggatgacaattattgctatccttagatcaaattaatttatgtgtacgttgagtgaagttggtgaaagggggaatgaggtgaactctttttagtagggaaaataggagaacacccttggggttcataaaatccagtaaagctggaggcacttgagttggccagcagtgccattgagcatgttcttgcaattgattttaaatatttctcttccttgtgtctaacagccaatgagtatggtagatagggtcattttcatctattaaaaccatttacagagctcctggtgtccacttagagagagggtggtactgaaaagtgagcactctccggctaaagagatttctctctttctataaatcaagaggacttttggaaacctgcttgcaggttatacttgttccctttttatgaatggcaaaatactaataaaacaattcacaagaagtccccactgctcttggatttgaccgcttgtgcttatttcaaagtttgtgcccaagtagcccaagttataatgatacaacacatctatgtataatgattcatgtattgttcggttgtctcaaaattctgttttgcaaaatagattttttctatctctgtaaatggatttagcaaaggaaatattacttcattcattcaatccacaaatacgggtcttctgctgtctgccaagtggtgagctaagttctcctatctgtttgcaagtggtgaacaacttcagacaataatttttagacatttgtataactgtacatttcaaaacctatgaaaatagtcaaaggaagggtgtgttcttttgtttaagggcttgaaaaataaaaataatcacattaacacatacctgaaataggaagactgcatgaaaaatgtctttcctgttaacaaaggcttgaatacatgcttccggtttccatggcagcccaaccaaacagaaaaataagtcatagaagtggccttttatatcaatgacttgcttcctaaacaataggaccaggagcagtcagtgaaaaaataatgactggtgctgtcctacttatgaaaactgttttacaacttatcagattatttaaaccagagggaacatagtttgaaaataattgacacaaaattggaatttatgttttcattttgactatgtctgtctctagggtcattacttaaaaaaagaaaaaaaaagattcaagtaggaaaaaaaaaaaaacctaaaaataattctgtcaaacagactatctttcctagatctaacttgctttagaaaatgtatataggaaattgcattaacatccctttagcaggagacaattcttaaacttaaattaaactgaaaaagccacagaaaaaagggtttgacaccctaaagccagtgtccaaatgaacgctacggttgacctcataggtgtgttatgaatgtttaccctgacctcctagaagaaaaggaaaaagaaaggaaagagagagggagaaggtgagggaaggggggaagaaaagaaaggagagaaaagaagacagagaaaaaacagggagggaggaagctggggaaggaaaaagaccatttgctgactccgttgttttatttcccagaatgattcaatacctcaagaagatttcactccagaagtgtacagagttttcctcaacaacctttgccctcgacctgaaattgataacatcttttcagaattgtaagagtacacattttaagccatatctttttcagcttgcattgattctcaggtggctagagcaggacttggagtggtaattggagatggaagaacatcatacactgtgtctaaaagcaatattcctgtgtgatgttttggataggatcacacaatcttgcccctgaggtgcaaccactgcttttaatgagtacaagtttgctgtgatatattgctggaggtagttgtttttgtatgctcagataactttgtatggttgaaggattatgggtagaacagggagtcatcttggcttagcagaaatagactcatgtcgcaggaagaactctggattgggaaccagttattttatctctctgagccacattagcgacatgagaagtttggattactaagaaccctctcagctgaagaattatttgcttttctgttagaaattataaacttatatcaaggcattacctttttttgaaagattagaagaaaaaaggaaaaaaaagaaagaaaccaaagcactaaggcaaatgtggggaaagtagcagtttacctttcttaaaatactgaaatccacatgacagaaaatcaatacaaaatgtggtaaacaaaataaggatttcttcaaatggaagacaggtaaacagtactgctgaaaatgacattgcatattcttgctttgtgctgttcattgccatcatatatttactgaacatctgcaacatttgtaccactgaatttgtctttagatggtcaatacaattgaaatgggaagtttgaacaatatgttgaggaattatactctcttgttgaagcctaactgtaacttttaaaaacactcaaacgggttgtttactttaagtaatgacaataaatacatctttaaatgattacagatatatggagttggatgattaaatcaaaaatttactgtcataataaaaaaacctctgtgttcggtttagagtggtgcacccttatgcacatgatgcagtgttttcccactgtgggttttcttacccatttggtattttgcaagagcattgggttttagcggtagcaattgcacaagatatttgtagcccatagaggtatagaaattatggtggagaagcacagtgttttcagggcaagataggagtttcaatatagcattttcttatcaagtataagattttatttccctagagttaaatgcaaatattagaatgaaacttagtttaaaaaattcttattgcttggtttttcattgtttttagtggtgcaaaaagcaaaccatatcttaccgttgatcagatgatggattttatcaaccttaagcagcgagatcctcggcttaatgaaatactttatccacctctaaaacaagagcaagtccaagtattgattgagaagtatgaacccaacaacagcctcgccagaaaaggtcagtactttctttcacaccaaagggaagctcttgtttctgattgggggtagtcacacgctgggagttaggaacaccagtgatcgttaggttagtttcctctgtttacaaggcattcctttcggtctgaaatcacttggtggttcagtgcactaggtttttctttaaactttggtgtgtgatttttttgtcattgttgttatatgtatagatgcatgtaacatatttttaaaatgtctaatcctttattttgtttcaaattcacgcagtgactgaatgcatatttcatacaggaaatcactatctttaggttacccttttgtctttttctagtaagttctgtgaagtggcccacaagtttttctaacgttctaaaactgaagggaatatttagtctgtgagacccttatctttttccagtatatactatctgataaatactatctgataaatttttctacttggggaaatagtctaaaatttggctgtctgtgtaaaaaagcctagtgttgtaaatacaaaacaatccaaaaattgatagcccaaagacagctctaagttacctggaagtttttaagaaatttatatttttgattctgggaaaatgaattgccaaaataagatcatgaagatgtaattactgcaaattttcaactatatgtggcagcactgtccctgaacaagatcttccactgagaagactaactctcatctggattgaaatatcttcaccaagaaaattagtgtgttatcactgatgttattgcagattgcctagatattccatagggaggaaaataaagtacaattaaccaattattgaaaagaaatcaattatatattaatatgcaggcattttctaaagtaacagaaatagctctagcaagcttatggtcatcaataagaatgattatcataaaagtaaatttaaaagtcttttaatccattgtgtttaatctggaactggtcctctaaattgaaaatgaaatcatgaagtataaatgggcccaggcactgtggctcacgtctgtaatcccaacactttgggaggccaaggcgggtggatcactttaggtcaggagttcaagatcagcctggccaacatggcgaaatcctgtctctattaaaaatacaaaaattagtctggcatgatggcgcatgcctgtagtcccggctactcaaaagactgaggtaggagaattgctttaacccaggaggcagaggttgcagtgagccgagattacaccactgccctccagcctgggtgacagaggaagactctgtctcaaaaaaaaaaaaaaaaaagaagaagaagaagtataaatgtaaaatctaaaaatctattaatcatattctacatgctactagttgggaatttttagatgcaattttttagttttcatttgttttcttggtgaagaactttgcctttgttgttgttatcattttcactgatgctgtgaaggtgagattagttaaaggaaacaactagcccaacagtatgtcttggcatggccaggcctgcccctccaaacctacttaaataggttgcccttccttccctagtacacaagagatgagatttccccttatcatgaagcagggaacatcttggaggttttgcccatgtagcttaggagttctcttctaaaatccaaacttctccaaaaataacgaacacattgttataacaaatccaacaacacttctaaaaatcagttagcccacgacactaggaaaacaaaaagcttttctgaaaccagtgaagcactccaaagtgtaagccttttccttttctccttccttcacaccacactgctgatggcacaggcttcagctggtatccaatgcctccatacatcatcctctgatgacttgcacgatgtagagggtacaaagagaaaaaattgtgatagattactgtaaaaccccataatcctagaaaaactgattttgattctaatggaaattaagatgatgtctcctagcatttgcaaaattatttagtgccattttatgaatttcaaatcgaaagaggcacacaagatatttaaaaatttaaatatttttaaaggcaactttatctgtttttctataccttaatatgacattgatcacaaaacctctgtgtcaaccttaatagcagtataaagaagcaacatagaataatggttccacttttgagtttcaaagctgagatccacctcactagtttcatagccttatgcttaacttctctatgccttaattatttcatcttcaaaattaaggacagaagaattcttgatatgcttttcatagatttgaattaaataatacctgcaaagcatttggaaagaagaatctgggcctgtgtaatgtgataaataagtgttaactcttctcaatgttttgaagtgtagtatgttggttttcattcctcaggtgtcgttgtccattttttctaggagatcccatgatttctgggccttaaactttcttctgttttccccagcacctagaagatgcacctgctcatgatgaaatccttaatgtagacttgtagttgtgatctaatcagtgacccaaagcatttgtgccccaacttatcacttaagaatattgcctagtggtctctgtacagaaaaattttggctaatgctgtctctacctaaagccttatctagcacgtgggaaggacagaggctttggagtccaacggttagaatatggctaaagggccagccacctgctaccatataacgtgcatcctcagtcaccccaggggactccagcacccgttcagaagttctggctggctgtatttgtagctccttcttctctagaatccatatgaaagaaattcaactcttgaggagttaaaagtcaaattacaaagaccttagtagggtcacttcagctttaaggcatgtacacaaaaacggactcatgatagctgccttgttttaggataaagggagattgtgcctgtttatgtttagttcagcgcacactagtcattcagtaaatggcctaaattgttattatcactgtttaaagcaggccaaatagtactagaggaagcacacagtctctggtattctagtcttacaaactcaaacttacaagccaacctacgttaagtaattcataacttcagtattcaataaatcttcagtgaaaggcaagaggctacacacagtgacagacccagagataaaccctgtgcccctagagatttgcactcctcttaaaagtgtatatatatataattatataattatttattatataattatatataattatataattatttattatataattatatataatatacaattatttattatataattatatataattatatatttattatatttattatacagttatataataaataattatataattatatataattatatattatttattatctaattctatattaaatataattatttattatctaattctatattatatataattatttattatataattctatattatatataattattatataattctatatataattatttattatataattctatacataagtatttattatataattatgtatataattatttattatataattatgtataatatgtaattatttattatataattatgtataatatataattgtttattatataattatgtataatatataattatttattatataattatgtataatatataattatttattatataattatgtgttatgtataattatttattatataattatgtataatatatatataattttttattatataattatgtataatatataattttttataattatgtgtaatatataattatttatcatataattacaatatatattattaacataatatctaaatatattaataatctaatatctataattaatataatatataaatattacttcttgaaatccaacgtgcacctgaatcacctgagccgttgttaaaatgcagattcgagatcctgcatttctaacaagttactgggtgaggcagaagatgcttagcaaaggcccacaccgagtagcaaagctctaagaagtaaagagaaggcgcattaagcatgaagataatgagatttcttcctgtaggggacagttcatggaagagataacatttgggctgaattgattttaacacagatgagctacagactttaaaactttaaacttttagtcaagtagttaatacatttggatcaataaacacataagaaaataagtagggaagtttagtattacattataatttattcttctgctgctttcattttaactgttttcagatgtgcccaggtgttagttaaattggtgttgatctcagtgctgatgtggaaattgagtcttatttacctgagaaaggcacttccatatagcctatacttgttataaaatgctaagcataagatacacacataatatacataatagaatataaacatatatataacatatatatacacacaacatagatatacacacaacatatagttgtgtgtgtatacacatacacagagacacacacacagtctctgatatcaataaacatatcttaaagtaggtgttaagcaaataaataatatacaaacctgacatatgctgtttagcttttatgtacattttacataatttttacataaaagatagacttgaaattaaatgaaaaatttttagtgtcaccaaaagcccaaatgccaaagccgaccatagtttagctgactaaaagtgtgacacatggaagtatgaaatgaaactccagaagagacaatagactttgatcttctgaggacctgctgtaattagcatgtcagccacatctccatgctggaatttctgttttgggagatgtgtatattggttataaataatcagaggatttctgtgcagtctaaggccaaatgggtcatgtatgtgggttccagaaagagagaatttgaagcttgtcacagaggatactattctcctgggagtgtggtttatttttactatttaaaaattacacattgaaaaatgccatggcctctggtcagcaaaagttttttcctttccatcttgtttgcactgtagacttaaatattcctggcacaggaatatgcaatgacccctgcctcttccaaacaaaatgttcatgaatatcgtactttcaagatcagtgtctccaaaacagttattttttatcacttaaactcttcagatgaaagacagtgagtaaaattagcatgaaaaatagaatagctctataggtacctttggtaacagaatgcagacttcaactgatatatctataaatgaagtccaaattttacttaaataaactgccaaaccaaaagaaagcagtaatttttttcatgcttttattctgtggagatcaggtgttcatgagtgtttgttaaataattgaattaatgtagcagattataatagcagatgtttcaaactacattccttttatcatcagttcttcctcctaaatttttataaggtatactatacaaaagcgtccccactttgttgtaattaagtcataaaaatgaagctctataatcccttttagtgatcactactcgctgagttaatagtttaatagttgaaatgaactcaagattataatggcgaagcaatttggttttaggcaaagttcagatacagcaagtgctttagctttttttcctttaaatagacctaagccaataatgattgtatcagtaggaaaaaaaaaccctattgcattttcaatatagttttatttaaagtattatacaattaagctatattctctcactgtcaacaccaagaaataggctgagagtgatagaaagagactggacttgggaaacttgaaaactgtagttttagttgagactccttcagttgaaaaacggcagaaacttaactcaaactaaagcactgaataaatttgcttgtgcatataagcaaaaagtcaaggtgttaatggtttcaggcatgactatatccaggagctcaagtcatgttatcgataattgtcttttttcatctctcatcattttctcatactggctctagttcttgggcagattttcctgaatgataagacagccaccagcagcgccaagcctatagctcaccagtcctagtatacagaaatcctttttactcatggttcctgtgaaagtcccagaatccagggcatggcttcggtcactcaaggccacttctaaattagaatcacagtgtcctgaaggatgggataaaaataaatggacaggcttaagtcatatgactccccctagagcccataaggggtcaactacctaaagcacaaaccacacggaccgacaattggagagagatggttccctaaaattcaaccaggatgtgcttcctaaaggaaggaatagtggtctcttggcaaatgaaaagagtagatcacactaaaactagttcagaaatcattcattcattatgactttttatttggccttataaagccatttaacttctttgactagccctgctccctagttttctcaactttgaaattatttcctgacagaattactggaagaattaaataagatgcttttgttaaagaggttacatatatttattgttgttggctaaattgtcatttacctgaactaatgaaaagtgatcattggcatttatgccaaattattttaaaacatttatgagtctagaagtgagactcagagccttgggctgaggcattcctgaacattgctgtttctcatctaacagccttatttaatgtactgcaattaaggataagtataataatttattaatgaaacttgaaaaaaatatggcatgtcacatctgtgcacaaatggtcctttctgactcaatcattcttttctatacctttttattaaaatggaattataattatagtcataagtgtaaggatgtacacttgactcttactatttacttcattatcacttcaatttcctagtaaattttttgaatcatatttttccagcaccatttcgctttactaggtagacgttataaaaactaatgatggtgatgattataatctctattctccatccttgaaagttcaaacatgccctaattaaagaaacaggctggcatagtgtcatgatgaagccagtaaacctcaggcaagagacttgacttgtgtgagcttcaggttcttcatctgtaaaatgggatgagaccagcaatgtagcagacacctgtgctattcccatgtcccttggcaatcatggttccaacccagccacctacacacttggcaactcttcagggccttctatcagtccatccacagccaggctacaattcccagggactgcatgcctcaggagtagttgaagaataaataccttatcttccatgccccttgggttgcaaagttctgatgtgtgtcctctgctttctcccagagttcctcggtgagactgagccctaactgcccacagctgtaacctgcctgatacccttctccttcttagctgcctttccttcttgtctcacttctcttctctactgttgtttcatagggtcaactcccaaaaaaggtgcttgcactcaaatccttgtctcagatcctgtttttggaagaacccaaactaagacaagcacttttctataaatggccttaagggaatcaaaagtgaaagatgggtaaggtcagagttgctgagcattgagagaaaaaaaaatggaaagaggctgtgcctcatcattcctgccaacctatcacgttattgtcttcgttgtttccaatcacgaagccctggccagtggcctccaatcatagatttccagtctacaaaggacttagccatttagcttagtcaaactgtcagtttattagaagaggcagtttgcagaaatggcaatgttgggaccaagaccatgttttctttgtcccgctactccagacatccacctaggcactccaacaggacttgcttagaaaaaagttgcaacacagaccatttagaagttagtgatcgatgtctatagcagtggtttccaagctggtcctagacatagcaccctttgtttgtttcttctaacaaagtctcgtgagaaaggccaatatgtagggaaaagctttaaaggtgctgtcttggtggaatagaggggagcctggagtacaggtgatggtggctgttgccctatcactctttctcctcctgacctaccccattctctgcagggatgtctgcccaaaccctgggatattcaggatactcagtttaaaaaccactcctctgaaggaaatactgactagtttaaagatctgcctcacaattaaggtggcatccatttaagtcattttatatagattacctacaaagtagttgaggaaacagaaccgacgtgaatcaacaaagtcaacacaaataagatcaattttctcccaaaagacaaaaacagaggaaaactatatgatgtagccaatgctttcatgccttaattaagttactacactgaaaaagctgctgaaaagctactctaggattttattgatcgaaatctcatttaaattcctcctattgactctctaacctctgcggaaggttacagaaaaatggcattgtcgtccccgagtgcattccaagttcttcttaacttcatgtttggtatgttcatagacttctctgaaatatttcagattgcctaagaatgaaaaaaaaatttttcaagatcgtcattgtggatctattgttcattggttgacttggcaactccctttgctttcctttccgttattacatttcctttattcccagaaggcagggcctgggcctgaggaaaggcaaaggcctggcctaggaattctgtttcttttctcctttatttcagtgacctcagtgtctgctcaggcccacagctctggccagaaagtcacagccctgtctactcacagctgaaatgtcctttgttcagaaaataaccagacaggaaaaatataaacagtaaaaggcaaaatcaaatgccagtccacaggatagataagtgagcttggtagcctcatcaaccccatagtctgctgagtcttgttaaaacttctttccttcatcatacctttcagaggtgccttgccatttcatgggagagctattgggacagagcagagaatggcttctttccccctagatgtgacctcccagcagaacacagcattgacaattgttggctagtatagctttccccttgtcagcagggtctaggagcaggttgcagtgcgtgtggggtggggtggaggggactctggctcagtcaaaactgcctggcaggttgtactgtgttgggagggagagaggccacaggcgtttggctcctaacttcggcattatccagggtcttgtcaatagtcaatgtgatacaacagataagtgggagggaaataggtcgaatgcagaaaaaaaaaaagcaaaccacagggaaaccagattaagtgagggatggaccttccaccctaacccttaatagaaaagctgaaaaatgtaccatagtagggaatcctgccaggaagtggacagtgaccaaggatttcaaaaatctcttatggagattctggaaggtctgtcttaactctgaatcactacagtctctaggatgccagctgtgacagcaaagattatctccaagctagggatagcattattttaacaggagagttaattgagaatgatggacaaaatcaagcttcttacctaagcattctaccttatatgtagaaaatgagcccaaaaaatgcttctgaacaatgtggctatatgtctttgttgagggttttcccagaagccaactttgaaagaagattcaagtccatagagtttggaaggtgattccaggaagtactagtagggcagtagggagtgtgaacgaggaagagaaagcagcttacaaaaaaatgtgttgtcaaggcagtcattcccaaccacagccattgttggaggatgctcttagaaagtgttaattcttaggcctttccagcctgcaccacataaagtcagccatcaggcagagatgcagatacaagtccagcccagctgtatctcctggagcaccagtacagtctgctatgatattattaccagcaaaacactattcacgatactataaaaaggatattcccacctcactttgcagctttaacaagaatctccagcatatcaaaaaagagatccttcaaagtacctgatgcttattgaacgcatttctttattctaacatatacctaatgcagttgcgtggacactttaacaatcatgtattacccatctaacttatgaactgctagaaaggggaacaaaatccagataagatatttgctctcaaggagcctataattacaaggagaaaattctaatatcacaaataattataaaacaagttataatgtgattcacttccatttcttcatctagctaatattcattcattcgtaaatatacttccattcattcatctagcaaatatctattgaataactatgtgcgagggaagcttgaaggtaaaggaaagttttgtttattgacattgtggggagtttccggaattgctctaagctctttacctgcaaattgccatggtacatttttcagcttttctatttcttgtacaaaacctcagacaagtcttcaagtgcatattattattcccattttacaatgaggaaagcgagtctttggatggtccagacatttgacttgttatactgtttgggaatgagttgagaggtaagtctaaaaatgtaacatttgtgacctgaatggaagccttcatgctattcttgacttactcgttggtttatttactcagcacacagttttttgagtcttgctacctgtgtcaacccttgagtaagacaatgaaaaggcaccattcttcacctatctgggctctcaatgtagtagaacctcctctgtagtcagtacagtggggaaggatgtgctgaaggcatctgaagaggaaactggcattccatgctgtgctttatgctgcagagcagagggccaaatgagagacaagaggcacttagggcactaaaagataacatgttttaagtagctcatcagaaagcattaatgagaacataattatgttctgggtctgcatttatgctagactatggaagagatgtaaataaagtgaaggccatggtccttgctcatacaacgccaatgtccaatttgatcaaggaacataacattctggtgaaggagctagaacatttttcctcccttgcattacggtcaggaaccactgtggagggtctcctctcataaagcactgtgacagtgtactcataaaaggcaatggaattggtttcctaccctctgagaacctctaattttaaatgataaatcagtacttatacaaatccatgttccaaacacagctctaaagctgtacttaagagagacaggttctaatctggattctgttcttatctttctatgtcattttaaaggggctatttaatctctcttgggacaactttgcttatctgtcatgttaaataataaaactgtcttctgcctaccaaatagaatgatgaggagtaaataaactcacagatgtgagaatactttgaaaaacggaaagtgctaaatcaaagtaaggtgttattattgagaattttcacacaaaaccacatcaaatagtacaacttaatacagggaaactgcaagcacacagaaagctgtgagcactgcgtgaagagctaatctgcaggagcttttgagaagagtacatagccatttaggggccattatcacaccatatcttggagctgtatttgcacatagttatggtaatagcacagtttttgcaatcaagatggaataacaatatatgacacttttcaacttaagataaaataataacacatgaaaacaggtgcagaacatactgactccagatttaggggaaaaatggtaaaataatgaaagaagccagtgaagttcatgtaatgtacaaaagcacagttagctggccagtgtgataggaaagtttgtgcccgggcaaagataactgagaagggaacatttagattatttcttaaaataggcaaatagactttggtgagccatgggatattaatgccatctgcacttactttctctgagctgatctagcagaattcgcaagggccaaagcaccaggaaaaaacgtgagccgagaaattgcttttcagtgctgtgcttagaagtgatttaaggaggtgctaaaccactgggctggtagctttccagtatgctctggtattattgcattaagagtgaagattgagcaatgatgaatggattctcaaccacctaatcccagtgacatccaaacatctgagtgccagatcctgcctaattggcatttggcacagtagaaggaggctggtgtccatgcaagctggcagacacattgtccagttttcccatcttgactgtgattattctacgtggatttatgggccatctgtcttccaaggcaaaatttgtagatttttctgtgctgcagagctctgaagatgttatttgcatgtgtttagctgtttttattttttaaagctaacctgcatattttttgcaaagcccacaaaacaatgtcacttcttgtgttcagcatttctcttgtcctcatgttggcatgacaagttttctgttatatttcatttttcttcctaaaattcagattcatgggttgagggataaaaatgctagaggacatctttaaattacttgcagagattagaatgtaaattaagtcgggaaaagaatttggaccttgatagacaaattcaaatcaaagagctaatcctcacgcctctgccagatgggtcatttgtccaccggagctcagcttctttacacagaaagattaaagtaacacgttttagagagataagtaaatcatgggaaaactctgccttggtcacatttaggattatttttaggaccaatgcagagtgcccagattgaagccaactgccaagaaggcaggatacctttccttcccatcatccatgccccctatccaggccagtgttaggaaagttatgtggataagcaccatcaaccacacccaccactatctgtctttccattgcccaggcatgatatccagatccatttcacaccaaataaccccgtgccctcagacaagttgctaacatctctaagcctccgtgtactcaactgaaaatggtaatttaaaagtacgtctctcataggatttctatgcctggcatgtggtcaatgctcagtaatagtagctcccattattatgataattattgttatttaccttcttctatcactagatgatgtgtgatgtctacagcaagcagcatagcatcatgtttaatggcatgaaacacaaagactgactgcctgggctcaaatcccaacttactcacttatgaattgtataaccttgagcaaccttatctttgcttgggcacaaaccttgagcaagctacttgcctcaggtttcccatctataaaatagtcataaaagtacccacttacagagttactgtgaggataaaatgagttaatacttgcatatagcaagtagcatatcataaaagattgttaaacaatatgctggaaatattttaaatcatgaaactcttctaaggctctcttcttccttgcactttcctgttatactcttttttttttttttttagtactgcatgtgtaagcatggcctgccacatgttctttccttgatcctttttcctttagcacttggctactgctgccttaaactgcttttgggactagctcaggagcagttccatgctagttctttgatgccatgatgtgggcatttcctagctaaccatccagatatgcataccgagcagggaagagcctcagtgggggcccttccagagaccttagcaatgtgccatgagttgtatttagggattagtttttgactatgccctatgtacttttttcttgccctgattcacagagctcatgcaaagtgtaatgagagaattacgtgctgaggacttgctactgagctcagaaatttcagttaaatgaggggcatcagcttgtgttaccagaccttatttaaagttacattcagctgggcacggtggctcacgtctgtaatcccagcactttgggaggttgaggtggatggataacttgagatcaggagttcaagatcagcctggccaacatggtgaagccctatctctactaaaaatataaaaattagcctagcatggtgatgcgcgcctgtaatcccagctactcaggaggctgaggcaggagaatcgcttgaacctgggaggcagaggttgcagtgagccgagatcgtgccactgcactccagcctgggcgacagagccagagtccatcccaaaaataaataaataaataaataaataaataaataaagtcacattcatgaactcagtggaaagtgagagcctattaaattatttcagatactttacttgtgaacctaataggaaattctaccagggctgagcaaattcggaagctaagaagagatggcactgatggagcaggtggctcgcaatgtgcaataccttgaagtacagccaactctgctgtcacttaaggattgatttggcttattctgaattattctagtccccttttccagtctattttgatagctttgagcatttaatgctgtctggttagcacttcttctaggcagaggtagggtgtaaggataaaactttcaatctctctaagactttgttaggactcagccccccaaatccctgtctttcttccgcatatttgttggacttcagggtaccgttagtcagtgccagcgaggcctcttggttctgttctgtgagctgttcattgcatttcttcgatgttttcttcttagtccttcctttgtagtgtcatttacggctgaatttggaattgccgtttttagttgtctatgatacaatatcgtttgagatatctggttgccaagatgaagcacaaaaccactcacaatataaattaatacataaatgttaatatttggggacaaaataatcattttttcaattaatatttgttgagcatttacaagccaggcactgttgtgagttctaaagatcagcagtgaactagagaaacactgcctgtctgctggacttcccactgagtgcctgcatctctttgctgacagctctctttagctgccagagccccctcttcccaagggcgcagttggccaaagagtattggggaattatcccccggaagcagtcctcaaacaatgactgatgggacttggtataaatactccagctccctccccccttaaatgggatcaccttcaagtacatgttttgtctcatttccttcaagggaaacacaaactaagacactccatcctcatgaaactcacaatccctggatgaagagaccaaaactagcataccagcaaatatatctattagtacaatgacagatggtgataaatgctatggagaaatataaacagcatatgagacaggagtgccagcaggagagattgctatttgtatgggctactcaagaaagacttcatgttgtggtaatatttgaggagactctcagtgcactcaaaacaagtctctctctctcactctcaatttctattttgaaataacctagagtggtggctaagcactaagagccttccctagtgcctgggcatcagagagggaatctggtccaagctggtagcgctgcattacctcattcttttctggtcttggtcattgaccatccttttcataaccacagactcagctccatctttgccacccttgagtggaccgaggaggaactctctaaggctcaggcccatctacttagacacttctgcttcaataggttctggctgcttgggaataccagcagcaactttctggaacaccttctgggaaaggagccacagagcttctctcttcaggacatcaggcttgtctgcggtttctcctagacttgaggacaaggaagcctcggtatgagaatgtcctcaggaccaagcagaagaatgtaccttttcattcttctttctctgccatccctttcttccctaaagcaaaaggtcaaatgctttgttgctgcttgttttggaaaagagtaagagggactggtgaaggataaaggaggaaatatgtcaactctcaaatatgacaggattgaacacatgatttattttatcaccttagaatttagttctagaagtctccttattttttttagatttgatggtataatttctatggcagtgttttgaattcaaattgcaactttacatgacagacttagggtacagaattacaaatctggacataatttcctggcgattgaatcaagtatcaacatatctgatgaccaccatgacgggagttggacaagtcaccagcactcagaaaatcaaaggtcagcttgactcaatgttcactcctttagaaacgtagggagttgactgcttcttgcacgcaccaccgcacctgttccacaaaagcggccttgtgagattggcaagagaagccaagatatccaagctatttcccacctaataagtacctgggagctcaagcttcctctgtggctctgatggcactctacctgggagaagatatagcaaggagaacctgacagatcatccatatggtgccatctgtggtaagagattagtcactgcatacttctcattagaaaaaatataaagaaagccagggaatcccatgataagtcccagccaggcaaagcagaagaccttctgctcttcccatctgattcaccattacctacaaatacaagatcaaagataaggaacgtaagatctgacttttaaacttaatcaacaaaaatatctgcagtatggtatagtagaaccatggaacttcaggataaatatggtagattgaacatattcaactaactgaactttcttgaaaccacaccaaaactccattaaaagagacttttaagggcataatctggcaagggtgagggataatagataagaaatgaccattacataatttaggtatctggctatatgtttacagcagttgacagatctgagaacctgatcattgatcatccgtgtgaaaacctggaaccaatccaagttattttataaaaaaccttaaaagtctcagaaattgatgatgtttgtttcctctggaagtgggattcaagataaggcataaaacaaagaggagagttgacagctacttaaggaacaatcagaactcccaccttagagggactatttatgtatttattctttggagtcaggaaaacagagagtgtgaggatgacacaaagcccagatgaaagcaggctacaggccgggcgcggcggctcccgcctgcgatgccaacactttgggaggcttaaacaggcggatcacctgaagtcaggtgttagagaccagcctggtgaaaccctgtctctacgaaaaatacaaaaattagccgggcgtggtggcatgtgcctatagtccctgctactcaggaggctgaggcaggggaatcacttgaacccaggaggcagaggttgcagtgaggcaagataacaccactgcactccagcctgtgtgacagagcaagactctgtctcaagaagagagaaaaagaaagaagaaagagagacaaagaaagaaagaaagaaagagaagaaagaaagaaagaaagagagaaagagtaccattttgaaagcaagaagataaagtaattgtaagcatatgaaaaaatgctgagacctcctgcattcttctccaatcttgctctagaatgctggcatccaggccttcactctatcctggcaagagattagatagaagttctcccaagaatctaatctgcctaagaggaaagacctaaagatatcaatattagggattactccgaaagatacaaaggaagatccctctgcagtgatgccttaccaactctcatacttttcaagcacagcaaacacatccagaaatccaatcagctttttagtctgccaacttgaaatatgaacagataattaagtgttactagacatatgaggaaaacttccttaaaaacaggaaaaagcagggaaaaaagtaactttgtaggaaataatgactatatagtgagaattcgttaagtatacacatatcattaatgtccatagaaaaataaccaaatatattatgtccatgaaaaagaacagaatgctaattttttcaataaatgtcagagaacataaactggctgttaaacacaaaaacaaagcactccaaaaaaaggtggaaatacagttgaggaaatcttttagagagtaaagcaaaaaaattagatggaagattggagagaaaatgtataaaagtttaaaatccggtcaggcatgttggctcaggcctgtaatcccagcaatttgggaggctgaggtgggtggatcacctgaggtcgggagtttgagaccagcttgaccaacacagagaaaccccatctctactaaaaatacaaaattagccgggtggggtatggtggtgcatgcctgtaatcccagctacttgggaggctgaggcaggaggatcgcttgatcacctccacctggaggtggaggttgtggtaagccgagatcgcaccattgcactccagcctgggcaacaagagcgaaactcagtctcaaaacaaagtttaaaatctggacaaataatattccagaatgaaaaaacagaggaaattatcataataattcatgtttttttccaaacaagacaacagctttcagactgaaaggtttcaaagagtgcccagcataggggatagataaacctatgccaaagcacatcattgtgaaattttaagaaacggggaccaaaagtgctagaaattgccagagggacaaaaaccaaaacaaaacaggccacacacctgtttttaggatggtgaatcacaaagtcttcaaacctcttaacagagctaaaagacagtggagcaaatttttcccacaaaaatcttttaaaaaaaaatccaacccaaaatactgtgtccagcaaaactagcaatcaagtgtgcaggtgtaaagaagtcatttttagacatgcaagcctcaagaaacttaacattcatgaatgctttctctggaagctactgaccaatgtgctctaactaaaattaaaaaattaacaattaaaggggaagacatggcataaataaaagagatttagcacagaatagaagtgaagaaaacagaaattaatcaatctagattggagcagataaaaggctccagaaaagacttcaagagaatctaaccaagagaacacttgttatatttgtacatattgcaaaaacatttagctaaccgggggatactttggagttggactggagatatatgcaaaaaattaagcaaatgataaaacaagataattaactatagggaaaattttaaaaaattgtgcatgaagataaaaataattgttaggttactgtatgactcaaccctgaacacactgtgtagtcatgataacataaagactgaacactgtaactaaattatagtattactgtctctgaaagaatgagagtaatgtatacatgtgctacaggagtagagataagaaagagcaatattctcatctttcatggtggtaagtcaaaaatagcaatacatgcgtattattttgagatacagaagtaaataccaaaagcttctgctaaaagatttgaaggtgtttgcttctaagtaaggagacatgaggaagcgtgtttctattaaccatcctagtaaaagtggtgctggatggcagccatagaataattctaaatttagcagataacccttggcttctcgaccatgttgtttttcctgttcttgtctcctgaagtggtatctgcacatcaagagcaaatcacacaggtggcttcttagctccccttggtgactccacacactggagacattcagcccctccctactccttccttctaaacttagcccatcggcaatcaacgctgactgatttttcttcatcttcaaccagacttgggcagcagaatggtagaaaggaaactggagcagagctggatcaaaatgaattgcttctttcagaagagtcctgaaatttacatccccaagaaggttcctatctggccaacatgaaattagtgtgtccactaactgattgcatgggctgcaactccaaactctttcgtgttatatgcactaagaactacactaaatgaatagaaacctgaactgatcagcaacaggaatcaaggatgaattttatgtgccatgtttttaagttcttgaaaggcaatgctctgatggacacatccttggttatttccaacccttgacacatagagatgcaccctcagtaaaaacgtgttcattggtaaccaccagtaaggaataccctagctccagggtgcgttcaaaacattttgctgttgctggagaaatatgaactgaaaacatcttttcccatgtacctgaaacaagagagtcaacccagaatgtctccttaaaagtaggtttttagaagctaatagataaagggatccgaacctgagaagatgagagaaccactccacaatgctcttctagaccattcttcctttctgttctccagggctcccttttctggatacagatcttcctcattcttaattgttgcaaggccaatgggatggccctgagtgtagaggaggcatcagagtagcccatagcccagtaaatactcaagggcctttgtatgcatttgcaagcatgatggcatccagctgagtgtcactggatacacttcagggttttaaagcatgattttaaagcatccctggaaggtatcattacgtcatagcagaattttgaattgatgtctttctgacatctttaggagcattgttttttccattccttgagggatttacatgttttgtacttcagctggaagtggtacaaacactatgtttgtttatgaagacttttaaatgccattatatgagtgacatgtccaatggcatactgatttattattaacaaaatatataaggtaatttatttttagcctttgtcaactaactttatccttctgaactcaatttctctttctggtgattttatttcagaaaacagtagcattgcttttactgtttcataatctcactcaaatgtgggacattttgttttaatttagctagaaataattcctaatatattagcctgattgaattcatagacttttagagctagaggagactgaggcatccatatagtttactcatcctataattaaggaatttgtccctgaccagtgaccactggcaagaatggaagaaaactggatttcttgtgctgttactaagttttttagaaaagcaatgtgttttgttatcttaattctcaaggtttttcattcttctatgtgcctcagtggaccagagtggatcagaaaaaaaaattgtaaatttttcacaaacagtgcaagtttgatagaaaagggctaatgcattttagtcaatggcgacaataatattccagctgaaggttatatggaagggatatcctcagagtttgttctctgccccaagtctttactagtcagaactattttttaggctaattcattatgacaaaacatctgtatttttgcaaatactcttgaccccttagctgacacctacaagattacaaactgactgctctttatctttacattttattggctttccttgactttgacatatctctgcctaatcatttaatgtatcaaaaatcttcagcatttgctccttttgttagcaaggcaaagctttgggattgaaaagttgatccctggttcacagttacagttccctgattgcacagttattttattgctatgatatgcatgtgtttacaagaagctcactggtagtctacaatcatattctacccaaactacccttcaaactcaatctttgttcttattcaagtttaggtaaattccttcaccagggatttttaaattctttaatataattataaattatcctcacactcactcaccaaactattgttgtttgttgattttaatgtatactaaaaattctgttaaaatattttattccaatgagataataaaggtagagaaaataaccaaaaaggttatggtttaattgacctgtagggtattaactagtctgtattcaatttagtaatatctgtctagtttgtgtttttggtttttggtttatttgcttggtttttgttgacaaaaatatacaaatacatacatacaaacacatacacatacaaacacatacatatatttgtgtatatatacttatatgtatatatgtgtgtatatgtgtgtgtgtatatatatatatatatatatatatatatatataatatatataaaatcagtgtctcatagcctcctttgacctggctttgacaacttccggattaaataaaacttggatacacattctttgcatgttccaaattataccttgaccttgattataatatcttcatttgagtatgacaaatatatgaagtgtacaccttcacttttctatcctgtacccaaggcagacatcaaaattaatcacaggcatggttcagaatctttctcaacacaagcacccagaagacattaacaataaatggaatttggagctaaagttaaaatccatttgtcatttctgccctattggcctatgttgttgttttttcttgcttttaaaagttgctgatcaaaccaaaggatgtttattcttgcatttcattcttgttcttctttcatgttcaataaaccattgtattagattgcacagttattttattgctatgatatgcatgtgtatacaagaagcatacacttgccagttttccataccctgtgactcccccagtatgcacactcatccagcagttacattactttcctttcctggcccctgaagatacttgcatttattgcctgtcttttaaggaattgttatagttagagattgggttgtgtgaaattgccttttgcataggtgaaaaacagcaaatattacaaatttcatatcatttgacctaatcagaacataagaatcaaacaaaatgctgctgtctttggtgatcttccagtttcaaaacaatttattttctattttgaatcccaataatcatccaaaagaagtagtgatttagcacccactgtgcacaaagcatctagtagacaccagggacgacaaagatacatgcacattcagcttttaaaggtgctcgtgcctgggtttcaaggggtgaatggccttattttctattagacggtgagctctttgaaggcagaggctgtgttttactgtgctttatttttctgtgcatttatcgtatggtagatgttcaataaacctttgtgaaattagtgaaaggaaaagagataggggagaaggaaaggaaatagagagaaagggagaaatagagattctggtgtgaaaagcacgtgcccaggcccagctcagcggctcacgcctgtaacctcaggactttgggaggctgtggtgggaggatcgcttgagtacaggtgttcaagaccagcctggggaacataggaagacccctgtctctacacagagaaaaaaaattacctgggcatggtggtgcatgcctatggtcccagctactcgggaggctgaggcaggaggattgcccgagcccaggaggaaggtttttcttttgcgaaacagctcctctcatcaaaagagccaaaacaaactttccttcttattttttattcttggacaatagtaaaagcaatttagctattgagtttccagaacttgggaaaagcagtcatcggtcaccttgagaaatgtattgaatgtgaaaagatttttactgtggtaaataatcagtgctagctttgccatttacaaatggcacatctcttagcaatcaagaataaataatgtttaaatcagtaaaaattagaattgttaaatgttgtcattttactgataggtttggcagtaggggagaagagaaggaaaacagatacttttatataccattggtgaaagtcaattgctaggactttaacagaaagaaaattggttatgtgtattaaaatcctcaaaagtatgcgaagtctttgaatcagaaattctatttctgggaattcatcctgaagaaataattaagtatttatacaaagatgtaaccatcagagcagtcaatgcaatgtcatttatactagtgaaaaaattagaaacaactttaatgatcaatgataatagaatattatttcatattatactgctatattttatgatataaaaatatagatagttgcatattttatgctatagttaaatatccgcatagaatttatttttacattaaaaatgttcataatatattgctcagttaatacaaaggttactaaattatatatataattatatgtatgtgtgtatatgcatgattacagcttcataaaagaattatacacacacacgggtatttttctgggaggatacacaccaatgttttagcagtagttatctctgaaagaaaagttagggatgttcaaaacaagttttattttttctctctgtttatctcatttcccaatttttctttaatgaacatattccacttttatagtaataaaaactgtttcaacaagaaaaaaaaaaagaaatgctaccctccgacatttgttggcaacatatttactacccgcaaatatgttgtttgaagctttgattgtcaagattgaagaaacaaattgtagtgatagaccaaaatacttaagatgatcctatgtatctatgaagattatgacaaaaaattgtctcaatacgtgtatcaaaacatccagttgtacaccttaaatatgtagttttttaaattatacctcaataaagttgacaaaagaattttgtcaatatttagtattagtcaactcagaaaggttacaacatagaaaaatttctaaatagaatctgagtaaactaaattacctgtgtcatatttctgccatctgaagtaaaataattcttaatatgagatttaaagatcttttttcatgagcattcaaatttttattttcaggaaagactcatttgtgggcatctttattttctgtttcagagaaaaatatcattatttgaaaacacctttttttttttgagacagagtctcgctctgtcacccaggctggagtgtagtggtgcgatctcagctcactgcaaactccacctcctgggttcaaacaattctcctgcctcagcctcccgagtagctgggactgcaggcacccgccaccacacccggctaatttttctgtatttttagtagagacgaggtttcaccgtgttagccaggatggtctcgatctcctgaccttgtgatctgcccaccttggcctcccaaagtgctgggattacaggcgtgagccaccgcgcccagccccaaaaacactttaacattattttaaataataaaaccacttgtaaattatttatttatttatttatttatttatttatttttattttgagaaggagtctcgctctgtcgcccaggctggagtgcagtggcgccatctcggctcaatgcaacctccacctcctgggtgcaagcgattctcctgcctcagcctcctgagtagctggattacaggcgcccaccatgcccgggttaatttttgtgttttgggtagagaggagacttcgccatattggccaggctgatctcgagctcctgacctcaagtgatccacccgcctcagcctcccaaagtgctgggattacaggccacttgtacataattttgattataaagtaacatacattaataagaaaaaaaattgaaaaattaccccaaattctattacacagagataagcactgataacattttagtgccgatccataaagttaataccagtcttatattggaaaacaggaggttggtgtttatttaaatcctctgaaaatttggtggggctcatgtaactacatgttttctctattgtctgtgacatttggaaataattgtagtgaaacagaataatcctacactcttatttatccatactaaaatgtcttctaccttggacactacaagatatttctggaaaaaaaaaaaaaaagaggcgacttgacacccataaaagaatgcattcacatcctttctaacttcatttcctccaggacaaatatcagtggatgggttcatgcgctatctgagtggagaagaaaacggagtcgtttcacctgagaaactggatttgaatgaagacatgtctcagcccctttctcactatttcattaattcctcgcacaacacctacctcacaggtatgaattttctagttctttgttactttagccagtctcaccaaatttcaccaacctctactttctgttgttcggaagctgaagtgtgttttcttccatttcctgcgaagtgcctctgagaactctggggttccaccactaaagcctcccgcctcccataagcagtcatgtccacatgtgtatgaagcaatagcatcatttctccacagcctaagtttttaagtcttctaaaatgcaaccacggctgacattttcagatcaatgggatttttgtgtaactgaactcattcttcagtgtacttgaagccatgtccagtcctacccggttctctgggctgtgttcatctacatgacagctccgaagttcttaagtggtggctcatgcttgtaatcccagcactttgggacggcgaggcgggcggatcacctgaggtcaggagttcgagaccagcctgttcaatatggcgaaacccctgtctctactaaaaatacaaaaaaaaaaaaaaaaatcagccaggcgtggtggtgcgtgcctgtaaacccagctacttgggaggctgaggcaggagaatcacctgaacccaagaggtggaggttacagtgagccgagatcacaccactgcaccccaacctgggtgacaagaatgaaactttgtctcaaaagaaaaaaaaaagaattaagtaattgctttttgttcaaggtaggacagggctttagacaaaaacaaattgacctgtgaatgacaacttatactttattgtaaatattataataaagtaggataaaacatcaatgtgtttctaatctgatcttaaattaagccttgacctatttggcagtctggtgaagtgtatgcacccttctcagaatgctaaatgcataaattaagtacctagaattaaagaggaaataaatttcattgaaatatttttataaaatgttatgatatataaccttgtgtatctcagtattaacacaatttaaataagtataagtaaaatgttgtgataatttgcaacaattggaatataatacacagatcttgctagtgacttgtaaactacatacttaactgaagagaatgttaaattttgtgtagaggttaaaattaaaactgtaaccattctttctcatccaagttcaaggaggttcatggaatatcactttaacagtctagatctttgacatgataaaattcaaagaagtataatttttaaaatctgagcacattatagaatcttacatttatcctatatttaggaccacaaaactcaaaaatacttaaatatatgtccggttgaattttgggtattgtgtgtgattttgtttaagtggaagtcacaatatagagtagattttttacgaataatcttttgagtccaaaataccttccaactgatatatttatattcattacattctattttatttgtcatataataaatgagtcagtaataccaaaatgattgaatgacaagactgattggatatacattttattttttcaccttctttcagagtatattaatttttccctttctgactatcactagggttttcagattttatgtatgttcattcaatcgcggctgccattctccttttgagagaccaaattgtctcaactttggttagtaggagacatttttaggctatcatctgtgtcctcttgacatgacctattaatctttgaaagtgttctggcacatagagatcttccagactcaccttattcctttctgctccagagatggaaacagactattctccagtgagccctggttctttttgatgggaaagaaaaagtatgagtaacagcaatttggaccctgaacattgcctggactgtttcagtgaacaaaggaagaaaagataatttttttttgtctttttaaggcacgagttcacataaatatttctacttctacctaccaatttaaattattattattattattattcttgagacagggcctcactctgttgcccaggctggagcacagtggcatgatgatagctcactgtagtcccgatctcctgggctcaagcaatcctcccacctcagcctcctgagtagctgaaactacaggcacgtgccaccacacctggctaattttttatttcttgtaaagacaaggtctcactatgttgcccaggctggactcagactcctgagctcaagcaatccttctgcctcagcctcccaaagtcctgggattaacgacatgagccactgtgcctgtccccaatttaaattatttttttaaattatttttccataagttataagggtataggtggtatttggttacatgagtaagttctttagtggagatttgtaagatgagatcctggtgcacccatcacccgagcagtatacactgaaccatattggttgtcttttatccctcaccccctgccccaagtccccaaagtctattatatcattcttatgcctttgcgtcctcatagcttagctcccacatatcagagagaacatacgatgtttggttttccattcctgagttacttcacttagaaaaatcgtctctaatctcatccaagtcattggaaatgctgttaattcattcctttttgtggatgagtagtgttctatcatgtatacataccacagtttctatatctactcattgactgatgggcatttcagttggttccacgattttgctattgtgaattgtgctgctgtaaacatgcgtgtgcaagtatctttttcaaatagtgacttattttcctctgggtagatacccattagtgggacggctggatcaaatggtagttctacttttagttctttaaggaatctccacactgttttccatagtggctgtactagtttacattcccaccagcagtgtagaagtgttccctgattgctgcatccatgccaacttctactgttttttgattcttggattatggccattgttgcaagagtaaggtggtatcgcattgtggttttgatttgcatttccctgatcattagtgatgttgagcattttttcatatgtgtgttggtcatttgtacatcttcttttgagagttgtctattcatgtccttagcccactttttgatggaattgattgttttctccttgctgatttgtttgagttcattgtagattctggatattagtcctttgtcagatgtatagattgtgaatattttctcccactctgtgggttgtctgtttattctgctgactgttccttttgctgtgcaaaagctctttagtttaattaggtcccagccatgtatctttgtttttatgcaattgcttttacccaaaagcaatttttggtcatgaaatccttgcctaagccaatgtctagaagggtttttctaatgttatcttctagaatttttatagtttcaggtcttagatttaggtccttaatccatcttgagttgatttttgtataaggtgagagatgaggatccagtttcattttcctacatgtggctagccaattaccccagcacactttgttgaaaagggtgtttttcccccactttatgtttttgtttgctttgtcgaagatcagttggctgtaagtatttgggtttatttctgggttctctattctgtcccattgttctgagtgcctatttttatgccagtaccacactgttttggtgactatgcccttagagtatagtttgaaatcaggtagtgtgatgcttccagatttgttctttttgcttagtcttgctttggctatgcgggctattttttggttccgtatgaattttagaattgttttttctaactctgtgaagaatgatggtggtattttgatggagattgcattgaatttgtagattgcttttggcagtgtggccattctcacaatattgattctacccatccatgagcatgggatgtgttttcatttgtttgtcatctatgatttatttcagcagtgttttgtagttttccttgtagaagccttttgactccttttttaggtatattcctcagtatttttttttttttgcagctattgtaaaagggttgagttcttgatttgattatctgcttggtcactgttggtgtataaaagagctactgatttgaatatattaatcttgtatctgaaaactttgctgaattctcttatctgttctaggagctttctagaggcgtccttaggattttcaaggtaaacaatcatatcgtcagcagtcagggacagtttgacttcctcttcacttatttggatgccctttatttctttctcttgtctgattgctctggccaagacttccagtactatgatgaagaagggtggtgagagtgggcatccttgttttgttcccgttctcaggaagaatgctttcagcttttccccattcagtattaagttggctgtgggtttgtcataggtggcttttaattcattaaggtgtgtcccttgtatgccaattttgctgagctgtgctctttttagtaatcttgatacctaacagattatacatactaactcattttctttactgaaaaccttataatagtattaagaaaattttcaatattaatacaaataataaaactacaaaatgtagttcaaatttgtgtatgcagtttttaaattacatttcactaaaaatttacaatcaaattaatttcttcttctaaattaatttcttctgaagtcattcatatgcccttcctatgtataacttggtaaacacagatgtggtaaaaaatttggctccattgtgtcaggttagtttaaatttgagggtgttggcatattaacagctaatcagactaaaaagatgatgtgatactttcagctattaggaaagaaaagggtttaccttttttatgaagaaagaactctaatagctgtctccaaatttctgtacaatggttttgtatcaacaccatctgattcatatacctcgtttctggtcaattatctcttcaattatttaatttctagtactgttagaatccacatattttcaaatactcagtttttaaaactatattaactatgttaaattgtattctcatctaaggggttttgtttttgctgttgttttttttttttatcttgctcccttttctgagctctgtattattataccaaggtttgcattagataaatctgtaaccactcaactgggttcttcttgcctgctgcctagaaaaagccaatacactgagaacagcaggtgttacaacagagaaagtttacttattgcaaggcagtggagcagaaggatgggacatatttctcaaatcagtctctctgataatccagaagctaggatttttcaaggatagttaggcagcagggggttgggaagtggttagggaatggggaatgctgattggtgggtcaggaaagaaatgacatgggagtcaaagctgtcttcttggactgagacagtccctgggagaagttaagtctgtttcttggcatgggtcacaggatgggtggcagtagttggtccatgagaattcaaggcctgaaaaataccttaaacaccagtcttaggttttataatagtgatgttatatataggagcaattagggagtttacgaatcttgtgacttcagtcctaaaccataattccaaccttgtggttaatttgttagtcttacaaaagttgttttggtccccaggaaaggaggggattagttttggaaagggactgttatcatctttgttttaaaatcaaactatatactaatttcctcccatagttatcttggcctgtactcaggaatgagcaaggacagttagtttgtgaggttagaagcaagatggagtcagctatgtcagatttctctcactgtcatgatttttgcaaaggcagtcaaatctacattctcacagtattaccttgccccagtaccagccatttattttcctgcaaggaaattaaggagaattccatataattagaaacaaaactatataaaaatataaatacaggctcttgaagttttgcctgaaatgctgttttgactcatgggtcaaaatttggttttacttcacatattattggtagaatcattgttttaattacagatgaaactaatgtagaagtcctgtttctcagaagcctttggataaactcaaatttctatgatataaacattcaagctaccccaaatcaattaagaatgttataaaataaaaatataaccaatgcctaatccaattgaatcctattaaatttttaaattaatatctagaaaataatttagtttttatactttacagccattttcagaacaagtaaaaactgtatttatagaaacattatttcatataaagagtggtggaaaaaagaaagttttcctatttaaatgagtttaagaaatgctaggtgcaaaggaaggttagcacctaccgtaatgtgttttgaatataaaataaaaggatcagagtctcacagtcatcaactcttcatcctccttgtcaccacccaacttattttcttggagcattttaaggactaatattcctgaaaaatgctatctaaatccaaataggaagaatttcaatattcaggatattttctttgagcatccaaagggactgtaaaaattaaatatacagaatgaaaccaatcagtttagcaatgcattattattatgtctatttctctgctcattattgcccctttgttgaatatcaagatgcccagaagtaaaaataaattgtatcattgagagaaatagatgcactgaatgagtggtttttaattatcatggtcactttttggatttggggtgattttggcagtaccctcagtactgattatgttttaaattattgcttttccttgaggaatctgccctatgactcaagaaaaagaaatcttcctaggaagaaacactatgcagtaaatacaacctatacttgtgcacctcttcataaaccttcccatactcccaactatttgggagataatggcttcagaaacactggaaaggcaaagcaatctatctccggacagctaatatcttcattcagataagaaagaaaccattagatttgagggttttgctatccccaataatctgatgaattaaattatctgactgaatgtttctgataattattcaactcctctcctcatgtataagttcttggctgaagaaaagttctaaaaatgatttaagacctagctgtacccttcccagtcatctgctacaaacccagactttgagcacccctcctctctttcccatctctcccactcatttagcccttagcatatgcaacgttttatcatttgtttttgctttagagcacacacagacctaaaaagtcaggtggtagaatgaaaagaagatgagcttaggaaataaacagggcccagtttaaaatggcctttaagtaaatgacatacttaactcatttgagccttggtttgtttgtaaaatgtagataaattaaaacagccagggttcttgtggctgaaagtaataggatgctattatttaatggcttaaagatttaagcagtgtattccctcacacagcaaggcacccaggagcagagtggttgaggattggttaaatcaggaattcattaatatcatggaagacccaggtggtttctgtctttttggtctccttatggtttcaagatgactgtgtaccctaagcattacctccctgtgaaccaagatccacaaaggacatggcgaaagttcttgtgacccttctaagagtgaagaaaatgttcctagaggttccctgacagccccccacctccatcccctcaatctggtaggcattctttatgccatgttatatatagctcagagtcacaccacacatcaatgcccacagtaattgctaacatgggccacagaactaccatgactgactgagaagaatcaagatttaccccaaggctgcagagaagaccctgaagcatatcagaacctagataaaatattttactggcaaggaaaaagagaaagaagagacagaaagggcaaccagaagtgtaagaatgggaagaaatttatgtttgcctccctacctggatggtaagggtaaaggaatatgtctcatatcactttcatatccccagtaaccagtattttgcctcccacagaaaatgttttggggaatatgtacaaacacataatggtgaagctcctataatcagtaaagtatatacttgaagtcattttcttaagagtggaaatgactttaggctcttacatagacactttgtctcctaagccatctcatggcaactgctctgtgttcaagaaagcaccatggtttcactggggcagcaggcagataccatgtaattgagaaatcagatcaaacagatgcatctagagagggtcaagacaaataatacattctctgcattttggacagtttcctcaggtgtagccatgagattatatgccctgaatggctgtcatagcattgaaagcaaggaaatgtagtcctcatctccatctgttgaaggggacaataactattgaagaaggccactgaattaacaaatatatcacattctggaaccttcttaccctggaggttgaagggaagacaataatgataaatatgaaaacaggcaattaatcatcagccactgcaagatgaaaaattcttcagaagtttgtgttaatggaggaattgctatttttgatcttctggttttttctatccctggatgccttgggtaatctgagacaaagctcaagggaatgtaaccagccacccaaaatgaatgcactcaagtgagaagttgcagagctgtgacttggggcagtattatgaattactctgagaaggagcttcagctcccaagttcaatcatggacttggaatgtattccagaggatgttcagagccagggagagatgatgtcaaatactagtttcagaaataccaaaggttgaatgactcatgacctatcactaatctcaaccttcagcgatccgctagccccagaagctatatttattcaatatattcaaatggaaatataatgggtagatgagatgtaataatgagttaagaattttagggaacaaaaataaatcagctttgaggcttaaggcagaaaagagagtaacagagaatatgaatacatgtgtttgaaaaatatttccataaatgaagtaaaacatacagggaacctaatatgcattccaaggaataggataattatggataaatgtgggttttctcaaagtatgctttctttgggagggttccatttctaataaaaagtattcattttaagaatgaacaatgagtttaccttggagggattctgttggtcttaggtggacaataaactctttctcttttttattcttcagtttttttccccacattcctttgcatctcacaaacccaacctcatgccttaccatggttttcaaaacattaactgatcaacattcaaaaaatacatcaaattccttctcattgttctttgattaaaaatattcacaagaaaatctaaggaaatgtttctcaaaactttgaacctcttattacagaatgctctagtgtctgttaggtatttatctactttgatacactgttaaatctgattaaattcttcacactatccttactaaagttagtaacattcaactagtattaatgaaattgattcagaaattgtacaatatgtaattgtgttgatatagtcagtgatgtgcgtaaacaattctctaaacagtacacacaaaaatctgctctattctttaataccggtgcaattttctgcaggagcaagcattttaaattaaataacctgataatatttgaattattcacttcctttagctatagtagctcctctttaagtttagaaataacatataaatgtttgtcttttcccctttactcccactgtccccttgtccctaatgcagaaaagacctttgtaaatctttgccatgacaatgtactttgaaaaggcaattaggaatggcaatttgattatccagcatcaggaagtttctagatcattttgtcagcatttctgcttttccaaatgcatctttgtgttgaaaacatcccatttttccagtagagaaaagttattatgcagacccacttaatcagcctttcagtgcatttaccagggctctatagaactcaaaaatgtcatccttttgttatgctggtggttgagtattatgacatgcatataaaaataaaattaagctagtaggcttaatcccattttctttgtcctgtgtgtctccacggggcacatcttgtccatgtcaaagtcattttaacagtttgcatcaatatgccatcttttaactggctatttaaaaaaatgatggtaggccaaatgtggtggtttatacctgtaatctcagcacttcctgaggcagaggcaggaggatcggttgagcccaggagtttgagaccaacctgggcaacataaggagactctgtctctaaacaaaatacaaaaattagttgagcatgctcgtgcacatctgtggtcccagttacttaggaggcttaggaaggaggatgacttgagcctagggggttgaagcttcagtgagctatgatcacaccactgcactctagcctcggtgacagagtgagatcccatttcaaagaaaaacttttaaaaaaatgattggggcttatagaatataaatcaaagaaaatatttaatagggaaaaccaaagacttcaatttgtgtgttgctaatgggcctgttgcaagagctatttattattactctttcaaaaatagtttatcctgaaattagtgacttccactgacttaagtaaaataggagcttttggcttccatgccctgtgtattataatcaaggccctcagacctttcaggtgccttcattataacaattctcatcactttagtagggtatgttagttctattcacagaagtcccattctggtaaagtttatctttttcttccattgcttgtgtttttggtgttgtatctacaaaaccattgctgaatcaaggtcacaaaaatttactgctgtgttttcttctaaaggttttgtagttttagctcttatatttgtacacttgatccaatttgagtttagttctctatggtatgaggtaaggatccaagttcttctttttttatttttatgtggctatccagttgtcccaacactattgaaaagatggttctttctgcacttaattgtcttggcaattgttgaaagccagttgaccataaattgagggtttattttggaaatctcaattctatttccattaatctatatgtctgtctttatgccagtaccacatggtcttgattactgtagctttgttttaagttttgagaagtgtgattcctccatctttgttcttatttttcaagattgcttttggctgtttcaggttccttaacatttctatatgaactttggatcagtttgccaattttttccaaaaaatcctggtgagattttgataagaattgaatctttaggccaatggtggggagtagtgtcatcttagcaataccaagtcttctgctccatgaacatgagatgtatttccatttatttgggtcttctttagtttctttcaacaacattttgtaattattagagaataagttttgcgatcctttgtttaatttaaatttatttatttatttatttatttttgagacagagtctcactctgttgcccaggctggagtgcaatggcaccatctcggctcactgcaagctccgcctcccgggttcacaccattctcctgcctcagcctcctgagtagctgggactacaggcgcctgccaccacacccggctaattttttgtgtttttagcagagatggggtttcaccatgttagccaggatggtctcgatctcctgacctcgtgatccgctcgcctcagcctcccaaaatgctgggattataggcgtgagccactgtgcctggccttaaatttatttttttttaaagagcacttttaaaaacagaatgtttagcttttctcagcatttgtgcctttggcaaacatgtcagaggcagctgacttatataatagaacagtctcccaacaataaattctcatcaggaggcagtcagaattaaaagagtgagttttgatgctataatcctggatcttctacttcctagcattggaaacttgggcaaccgaactctgtgccattttattatgtgaaatgggtatttttttattaaatagttatgccacagagattttttgtgaagattaaatgtttagtatatatacagtccaaaaacctgtaattggcacatggtaaatagttaataaacatgcatcgttgttattgttacaatgccctatcttttcccaaagcactactacagattctatttgaaattgagccattaccttctggtatgttgaggcagaagaaaggcaaagaataactgctgcagctcttagactctttgttttcctgttattgaggagcctttctaagaaagcaccacggtcatccttgcttcatgggaatctggggtttgttttgttggtgttttatagctggccaactggctggaaactcctctgttgagatgtatcgccaagtgctcctgtctggttgtcgctgtgtggagctggactgctggaagggacggactgcagaagaggaacctgtcatcacccatggcttcaccatgacaactgaaatatctttcaaggtagagtatatgaatgttactaagagaggcagctggagacacctgattccttttggttaaagcctcctaaggtagaaagtcccagtggtcacaattaagtccaaaggctgttaatcatctttgcaatttcagaggctaaaatttggctgtttattcatgaataattggcatcaggtgaattaattcatgctaaccaaattctaaggaaactgtctcgtgaaaggaaatatcaaggtatttgtcttgtcctctttagcactcttactcctaatttcttgcattttatttttgtgaaatatccataaagaatacagacaacttatttctatgctttaactaatggctataaagtatgcatccatgtaactaccatctaaatcgagaaatagaaacttggggagtacctgaaacacttccatgtatccattcccatcagaatgtcccgtttaccctcagaggtgactaccatcctgactattacagtggtccctactttgcgcttctttagagcacaaagtacaaatttatatgcagccctaaatgatgtagcttcaccaatttttttcacttgtaaattgattcacactatagtatacattattttatgacttgcttttttcactccacattgtttagaaggttcattaatattgtttcagataactctagatttgttggctttctttatcatgatgatagtattaattattactgttaattattatgtaagattccattctgtgatgctatcttttggaatgttgacgtctatcagtcaaagacccctaggaacatacctatggtcaagttgggtttgtttgctcatacaacaaaggagaacacatgttgtagggagctggagtgtctcagtaaaagtttattagagaggacttacaggacttgggcttatagtaggtgatttgggggacggttcaaaggagaagggttttgcagtggattgggtgctgtcaggaggcacaaacaatcctatgagagggtatcttagtaaatcctatctaggaagcaggactaaagctgttactgataaagatgcatcagccattcttgttagtgagaaatgaggtgcatttggtctctctctttttccacccttagctctattttgcaccacaaggggccacacattcatgtgtatggacacccaagcccaaatatctaaagtctgtccacatgtcctgcaaagagccttccccagggggtaggggccattggagtaggggaaatctggggtcctaggtacttggagagtgactggagaaagaagttgtgggcttcagggaacatgttctctccgctgactccggctttctcacccctttaaatgggaatcagaagagaagggccagaggacaacctctcgcactaggtcccaaggcataagccctgttgcctgggatacctgggtctcagggaagtgtcactaactcttatctgaagcaaccaaggaaacagagtccaagtaagtaattaaggtgagtggagacaaggccattgaacatgggagatcagagtactgagaagcaagaatatgggatgaattcaatgttaatatcaccaaggttagtgacgaagctttggatgaagaaactgtgtgccacttgccaactcttttctgaataagggtggctcagtagatggcagaagtgaagaagaggtaaaaactcttttggctgcctcatgggaactaggatttttttttaaagaagattgaaaggtagtgttttagaagtagcattgagagcaaaaagatcccaaaccccagcttcttaatgtgaaacacttgagatgtgagaaaataaacagtgatcactgaagaaagcagctaacaagaagcaagattttcaagggacagccaagtttctgtttagacaaaaggatttttctgattgaagttgctgtattagacaataataaaaatgttttcagcagtaatatcattcacacctaaaaatatgtgtattatgttgtgcctaaggaatacgacttttcatttatgcaacttagcctacaatgcaataattagagaaaatagcacccttcacttaaattttacaacaaagtttaatacagggttgacattaattctgatcaaaatctttaaaagctgtgtctgttcctgaaattgagcatgattatgacccttgcattttcttaagtggaaaatcaatgtttaattcatttccatagtcccacttcttccctctcagaccttgctatggtcctttgtcaactacctaagatgcagtctaacagttgggctctttaagaaaaagtggagacaggttacccccatgtggaaccagtgcagcttgggctcatctgtctgttgatggatgatgatgctcctggaatggcagacagcacgccctgatggagctgagagctggtggcaccgcacactgcccatccgccaggaagacctgccccactccctccccaggccactgccctgtctaccctccagagacattgtgagaagcaattgttattttcttaataatttaaaatcctccaagttctctgagttccttgtgggagaataaacaccaagcacatcctaaggcatatttattttatgtggagcatttgcttcttggcctctgcctgccattgagtcaacttggagtgactctccttgtgcactcgatcatagaagtggttcttcaattacatctgtaatcccagagtcacgggctgattgaacatctctttctgggctctggaagcatggcttctcaaccacgtccatacacttgccagtgggtgagaggcttaaagactaaaatctaacccagaatgctgctttctctctctgcctgctggagttgggagtggggaggtgaccaggatggctaaagacaggagtgaattcatcatcccagttggtttttccagctattcctcctgctaatgcacatagcaggatagacagttctggctgagatgtggggaggtgaccaggttggctaaagacaggagtgaattcatcatcccagttggtttttccagctattcctcctgctaatgcacatagcaggatagacagttctggctgagatgtgggtaggtgacagtgggtgaggatggatgtggggagtggaaatgccaacctattttgcagactgatatgcagtagcaaggatgctttgcatcaggactgagactaggaaagacaagtaagtctcctagcaagtaaaatttaaggacgtctttgctctcagggctgtgtaagcacagagctggcactagagagtgagtgtctctttaaattttgcacatagtcgcctctcttgcctcatcctagtcccaacactgcttgcatgattatcagcatgcagtctgctttccctgaacccagcgtgtaaagtgactttgtaataagaaagagtaagaagagaaacagggcacaaggccctacataatctgcaatcccattaccttgtttcttactgctttccccctcatccactgggctccaacagtactgaccttgctgttcatgggctgtgccaggctggccccgcctcacagcctttgcacaggctcttccctctgcctggaatggtattctcataggtatctgcctggttcttcccttgcctccttgaagccttcctcaaatgtcaccttctcagtgaggcctcctgggacccatctatttaatactgtcaccagccaccactcccaatccccacactactgacgtaacccctgacacccccactttttagtaatgtattttcctaaggcacttatcatatcaccttccaacaatctgcctaatttgcttaattcctatgttccttgtttattgtcccttctactaacgcataagctccacaaagacagggctctttgttctgttccctgatctgtcccaagttctcttctttgagcagaacctgacatatagtagatgctcaataaatgtttttgaatgaattttcccttcccagagcaagtagatcaaatacagcataacctccattttcagtctttcttgcctctgctcatcagataagtgaatttgtctttctccatcctacacataatatgttggtagaggcagggaaaacattcccccaacatttgccagttttagctgccctgaacatttgggccagatattcacagtataattagactatattctatagctacactgcatagtgcagcagcaaaataaactgattgcagagttcatttttatgtcacccagtgtatctgctttcagtatgtgtgacctggaaagcttctgtgtgatagatcccaaaagcaagagatcctattggcatttgctccctgtttactgtatgggtcaaaataaaaagttacgttctgggaaaggagacattcagctcctttatgaagggctttttgttttgtagtctggctttattatttatcccatatatctgtttcaatgcctcatcaccttagccttcctggtggccatgacatagcaattcaccacttagttttttcattctctcttctcccacccaatatcctttctccttacgcttgacaccacctacccacctccttcccagggtggtttttctccctttaggcagcttccttttaaccagcaattatataagatggaaaactggataatgtaataaaatatatgaggaaaacatattaaattagagtaggttaaatccagcatttctgaaaataaagtgtcattcattccctgagaaaaacaataatttaggatgcagtttcactgctacctaaatgcacatataaaatggatatccaaatacaccctactgttgtctgtcgaggataaaggatttcaaggccagtttgtctcactggagtttagtaattgaaccatatggcttatagattattgaatctagtgttacaagtctctgaaaaacaattttggcttgataaagagcaatggagcattaccgtactttcacatccaatgtccaccaattacagcaagtatgaaagaatgtaacttaaaagctataactggttttctcatcctaactgatcacgcacaccatacaaaatatttcaaaggcacaaaagcatgaaagttctccagtggaacttctgaagttttcagttgctcccaactaaaattattagatgaaatttagtaattttttttgctttaataattggaaaattttcctaagctgctagctaaagttatggtagagatggggagaggtggacagagagaggagggagaaggatgggtgagaaagagagaaaggtgaacacagaaggtaaggatgctactctggagatgactgccaggggtccagtacaagctcttccatttagtcactgcaagaccttggagaagcttccttcccagtgcaagtctcctttgttatcagcaaactggagatgataatagtgcttacctcctagggtggttgtaagtaagcattcaataaccctacttaatacacaaatattgcttaaactatgcatggcatgcagtgcctactctataaatgttagctttggatgttatcattgaaattcataaaagccaaatgttagctttctttctgtaaatataatggttgtgtgttacataggcatggacttattaagccagagtgaaggtggggggctaaattaagtcatctgtaaggctaacatggtagaaggtgtgggcatcctctacgctcaacccatggcatccacttcacctccaggaaggtaccagaagcccaaattgtagtaaactaaacacagcccaggccttggttaggggcccagtaggagcagagaagggaacagcagatgagcttggatgctccactgcaaacatgagtcctaagccaagcacacaagatcagaagtacacaatgtcagaggcaggacaaatggaaaagcaggggaaacaacacaggaagatctaggaaccccagtggcccagctgtagttcagaccacactagcatccccactgtgggaagagagaatgaaacccagggagccaggaagatggggggcatggactccctacaagtctaagaggcccagagaaacactcacattttatcaaccaaaggaagatacgagagagatttgacctggagctaaatacccacttcctaaattagaggaggggaggaggggtcttacccaccttcagatttgactctccttggccgaaataccaatgaggtgagcctacaatccactttcattattaaaggcagctggagaagttctcaaacagacaatgaagacagccatcatcagaaaagttagcaaagatggccaggcgcagtggctcatgcctataatcccagcactttgggaggctgaagcaggcagataacttgaggtcagaagttcgaaaccagcctggtcaacatggcaaaaccccatctctactaaaaatacaaaaaattgtctgggtgtggtggtacatgcctgtagtcccagctgcctgggagctgaggcacaagaatcgcccaaaccaaggaggcagaggttacagtgagccaagatcatgctacagcactccagcctgggcaacagagcaagacttcgtttcaaaaaaaaaaaaagaaaagaaaagttagcaaagactaattacacttttatttacatgtgtatttgcaggacttttgtaatgtttattggaaatttcagccatgaagttgttaaaaagttaatctggctattaagtatgaatcaacattcaatcttctgtaatacaaaattacatttatctttggttacaatcaagttttaagctttgcttaagccaatgatcagactagtccaagggtcaacaaactatcttctgcagaccacatttatcctgtcatctgcttttgtgaattaagctttattgggacacagccacatccaattgtttacatattatctgtggctgctttggggctatgcattagtctggactgtctctatctctagagagacagagttattaaaaggaactggcttatgtggttatggaggctgagaaatcccaagatctgcagttggcaagctggagacccagctgacctaatggcacaatatcagtcccaatccaaaggcctaagaataaggagagctaatggtgtaagctgcagtccaagtccaagtctcaaggtaggagaagaccaatgtcccagctcaaaaacagtcaggcagaaacagcaaattctcctttactctttttttttttttcctattcaggcttccagtgcgttgaatgaggcccatccacattagggagggcaggctgcttaactcggtctaccaattcaaatgttaatctcatccagaaacccctcacagagacacccagaagaatgtttaacgaaatatctgggcaccccatgacccagtcaagttgacacataaaattaatcatcacgagctacaaaggcagagttgaacagttgccatagaaatagaaactatatggccagcaaagcctaaaatgctacctggtcctttatgaaaaaatgtatgctgacctctgagctagtcaatagaagaataaatgggaacacaactagataaattctgtttctcttctgtcatatattaggagttcattcattcatttgaaagtatttcctgagcatctagaatgtgccttagcagaacagtgaagaaaacaagttcttacctcaagaagtttacactgtctagtgaggaaagatagatcaaaataaacacaaagatacggtacatagaaacatgccctttaaagcaatctaaatcagtgggcaaggaaaagagagacctgaattatgctgtctggatggtagaggcaggcctttggtaaggtgatgtttaggcacaggtgctgtacttactcccaaatcaatgcagtaaatcatgctttaatgtgagtatttttgactgaaggaacaaagtgcaaagatggtgagatgaaagcatgcttgatgtattcaaggaaaagcaacaagatcaatggactgtatccaggtgacagagagggagaggaaaaagagatgtatttaaagaaatggcaggtgccagatcaagttaggctgtgtagattatgataatgaatttggatttcattccatgtgaaatgggaggtcattggaaagtttatagaaaggagcgaaactgtctactcatgtttaggagcaatgactctggctatggtgtggaatacagcggcaagtactagaagccaggaaagcaataaaaagactgtcagtcagcttctcctaggttttgctgcaataagaagaaaccctaggatcacagtgatttacaaccacaacggtttacttctcacacaggttagatgtcagctgttgctctgattgctattgtttggaattcatgttgaaagaacaacccacatctatgatatcactggactcatgggagaagagaaagagaaatggctggacaacaacatgatgggtctttaagactctactcagcagcagcacatgtcattttcatacacaggcccttggccaaaataaaaccacggccaagcctatggtcaacagggtgtgtagacagaattctcccaaaggaagggggaagcaaatacgtgggaatggtgataaaatctaccacagcagtcactgcagtggtttttgtatcaggatgatagcagtggaggtgctgacacttgactgtactcgggacctattttggacaagattgctgatgaattgaaaggtgtgagagaaggagaggaggcgagaatggctctactgtatttatcctttacctgatacactagtgccaaatttatgaaataaacaaaatccagccctttttttccacacttagcatccacatccttgatgacctctattctcagttcttttgagggctttgctcttagctggctaagattattagctgcatggaagttactgcaatggttgggtattaataagctctagagtcagacaaatcttcctggggtttaatcttggattctcttctctatgacttaaggtaagtcagttaatatctctgcaccttagttgaatcaagaatatataaccatcatgagctgagtcctttgccttctcttgctgcatcttcacaacagatctgtgaagtgaggtttattgcactttatagattagcaaaccaatacacagaggcattaagtgattttcccaaggtcacacagcttgcaaatctcagaggcaaggattcaaaagtcggtttgaatccaaagcctatactcaaataaatcaaatatagcatttaaaatctggatgttgcttgccttttatagtgcttgctttttttgacagactcaactatcgtaaaagttaaactgattatgtatgaaagataatctgtgagttcatttctaagaaacagtaaaagtgattcttctcgctccatgcaggcaaatccttcttagaggatatatgcaaatgtagtacagaattagaaagccttacttatactctggggccagggaaatagctttcaggagtggatataaagaacgctatatattgaatggggaaggtagagacgatagcagaaaaggctcaggcataaagaataggagtggaaatccctatttaaaaggagaatatgaaaaaaataaatgtaactaaaaacaagtgtatgggaatatgcaacctcactactactgaaagtgatataattaaacaataaatgagactgcactttactaccagttaaataagaaaaacatttttaagaataatgcccaaaactggtgaatatgcattgaaatctggtcctgcatgcattactctgggcaatctaaagtgaaaagtaatttgaaatacatgagggactgtaagagtattcatattcttaaatcaagaattccccttctgagaattcattcccagaaaatcaatcaagatattagggaaaaaatgaagctgttctctgtagaattatttgaatgacagctctgaaaatgtagctgtccaacagttggggaatggttaaatcaattttaatacctttactttctagaattttgtacatatattgaaacttgtgacatatacatttttaaaaatgcagattgaaaattgaagtactgatacatgttacaacatggatgaactttgaaaccatgctaagtgaaaggtggtcggcacaaacaaccatatattgtatggttacatttatatgaaataattagaataggcaaatctatgaatacataaagtgatgaatgattgcctgggactaggtgtgtggggtggggtgcaggaatgaggagtgactgctagtgggtacatggtttctttttgaggcgataaaaatgttctaacttatattgggatggtgctcgcatgactctctgaatatactaaaaaccattgaactgtacactttcaatgggcagattatatctcaaaaaagtcacatctcaataacaaagctttttaaaaatacaagttgagtatatactgtaattaaaactaagctacataaatacatgagagacagactagaagtgaatataatgaaatgctaacaatggtttggttcagaaagtggatttgtgggtgaaaatttttgccttctcttactgtcccaaatgtttataatatgattagatttctttgattattaaaaaatagatacaattagcaaacaggagaatcctctcctttgcatttctctctcccctccaccaaaatccaatcttcttataactttccagaatcaagagtcagaattagcaccgtccagcagccctcaaaatcccttctagccatttcaggccattcgatacaattctctgaatggaaaagacaactatattaatagatttaatacctttcaagaatatacagatgaaaaattctggcatactgaatatacatgtgttctcatttttaggaagtgatagaagcaattgcggagtgtgcatttaagacttcaccttttccaattctcctttcgtttgagaaccatgtggattcgtaagtattcaacacattcaggaatgagtctttttcccgaatagggcatactgagtaattgtttatcagatttaagattatttgacatgattaatggtgttcttcaatcatgttgtatattaactggcatgttttcatttgtaggtgatggaattcacttaaaataatcaacattaaaattatccgttggacttgtaggatctattttcataccatagtatggtttttaaattaaaaactcttctttttgcaatgcagtggaacacatttttctacacaatacatgtctctgttatagatttggggtgctgtgggccacttttataacccttcttcattagctccttctattgcacacaatttgagtccacttcatcactttgtggcaggtggggggagagctgtgaattccattttaccaatttgcacttacacagaactcagttcagcaaatctccatattcccccttttcactggctttcccctgtttgttaatatttgtatttgccaatttcaaaatagcctgcatgtattgctgagctacacaaagaaaaggttattttgacttcactgttttatattcattttatcacacattaccaaagagagacacatttatatctaatagatgtatattagtttatcatgtagttactttaaagagcttcagaatgaaagattcttatccatattgaatgaaagcctctctttcatttcaggaacctaagccagatttttcaactaaaagccagcagcacctgtcctaatttggattacgagtttctttttaccctccttcctattgggagtctttcccaggtcactgagcctctttgtccaagtaatttgtaacatgtgcttcaattctctaattcttaaagagttcactagatcttaaagatgcagattggtcatgggcaaatttcaacttgaagaatttctaagtagttaaatgtgacaattttataattatctgtattttttcagtttgcccgccagaaatccatattatatttaccggcttgtggttctgcttcattatgcaacaatcatccaatgaatgatgtaatcctttggcacatagtttctccaacgcttctgagggtcaaaggaagagaaaggaatttattctgttccatgctatttctgttcttactcaaaggggcatctctagaagcagtatttaatacctagtttgctttgcaactaggttctgctttgcaattgactctgttaaacaatttctcatctctgtcaattcatttataattggcctgtaacaatacgtatgagtccattcttgtactgctataaagaaatgcctgggtaagagactgggtaatttatgaagaaaagaggtttaattggctcacagttccacaggctgtacaggaagcatggtggcatctgctcctggggagtcctcagagagctttttactcacgggaagacagagtgggagcaggtgtcttacatggcaggaggagaactaagagagagtggggaggtgtcacacacttttaaacaaccagatctcatgagaactcactatcgcaacaacagtaccaaggggaatggtgttacaccataagaaatctcccccatgatccaatcacctcccaccaggccccacttccaacatcgggggttacaatttgacatgagatttgggcagggatgcagattcaaaccatatcacaatacttgagcacttttctttcaggtattatagtttcgacttgaggatgctttttttttttttttttttttttttttctgaagcggagtttcactcttgttgcccaggctggagtgccatggcacaatcctggttcactgcaacctccatctcccgagttcaagcaattctcctgcctcagccttccgagtagctgggattacaggcatgcaccaccatgctcagctaattttgtatttttagtagacacggggattctccatgttggtcaggctagtctcgaactcccgacctcaggtgatccgcccacctcggcctcccaaagtgctgggattggcatacttatgttcttaaagagaagtttctatttaaattagacaaaatgaaaggctatggttccattctatattgtcacacctgctacactgagcttccccttggcatagccagaaaaatatcaaccgccaccaccaccaccaacataatagctaacctttattaatagcgaacatttattaaacattttttgtgccaagcagtttttgaaatattttacatgcctcagctcatgtaagccttaccacaaacccaggtgcttctaagagtaaatattatgattatcgccattttacagatgatggaactgagtcctaaagaggatgaataacttgctcaaggccatgtaactaaaacatgacagagatgggattccaatccagttagtgtggcttcaaaatgcacacttttaaccaacacatctcctacgcctaaacagaagcatcaggagccttcaaaacatcaaattcagacaacgagagcatccaccaggcaatggccagcaaatgtttgcctctgtggcttgtaacccttaaacacaagatgtgttttgcagttcttcacactagtcatttagagatcaaaaactggacatgaaaactaatttctgcactgtgcctaaaggcaaagagactagtgccattgtactgcccttatgggcttaaaaatgataaatttagctattaaaagttcattaataatttctatgtgacaaaagaaaacaggaaaacagcctttccaggatgccatgattgtgtcccaagccactgagataatgtaatggcagtgaaatactaaaagataaaattctattgtggaggaagtgggtgggagttgcttgcttcatatttcccttgtccttcagatatcaaaattgttcagccaccattctttcctgggaggctagcacacacccaaagaaaaccgataagctttcccttcgctggtaaaaccccgtgcttgacttgtgagccacttcatctagttcctgagcccatggtaggcagtagcagcactctttcccactaaccctagaaataacctcagaatccttctcaacacagtgacctcagactagaccagcaagacatctgacacctatttgccatctctgatgaactattttatttccctgtgtgctgcatgtatggaatttcagattcagaactctggtcccagctcacttgggccacacgtccaaaacaaatttatactagaaaaaaggagaaaaggacagggcacggtggctcacgcctgtaatcccagcactttgggaggccgagactggtggatcatgaggtcaggagatcgagaccatcctggccaacattgtgaaatccagtctctactacaaatacaaaacaggtgttatggcgggtgcctacagtcccagttactcaggaggctgaggcaggagaatcgcttgaacctgggaggcagaggctgcagtgagctgagatcacgccactgcactccagcctgggtgacagagtgagactttgtctcaaaaaaactaaattaattaaaaaagaaagaaaaaatgagaaaagccactgaaacttctggttttctctcccaatatctgaagtcacctatccatagacaataaaagggaatctgctattagctgctttcaatgtatcctgttgctacatcagaatcccatgaagtgtcttcaaaatgcagattcctgagctacacccttaccctgactgagaatttctagaaataagacttgaaaatatatttttaaaagccctacttgactctgacatcctacttgtgaactaacacttttataaaaagaattctacaccaaattcaatggaagtaatctttacccatgttcagccacagaaagctgtgaaattttgaacaaggttcttaatttccatggattgcagattcctcctttatagggaaagaggttggtttagttcaaactggaggatttgctcccaagaaatcaagtgagttcctcggtcagaaaaactgacctctgccccagacgctcacaccttgggagtattttattatgctcagaaatgtctgctatgacctgaagctcaaaatgcatttgtgattttttttccctctcactttgtccccatggtagctgatattgatgctctaaacacttcaggattttgttttttgctaattgcaattttaatgccttttatttctgcagttctgacctgcaattaaagttggtttgttttcctctgactttttcaattcaatttgctctctgctctgatttagttccatcaggtgggtgtgcatgtttattgagaacatgaatagcctgattaccaaatagctcattttactttttgctaggacacctacctcttgttctgtccatctcagttgattctgaggcaggttttgtttttgtttttgtttgtttgtttggtttgagggtctcactctgtcacccaggcaggagtgcagtggtgcaatctcggcttactgcaacctccacctcccagattcaagcgattctcctgcctcctaagtagctggtattacaggcacgcaccaccacaactggcaaacttttgcatttttagtagagacaggatttcaccatgttggccaggccgatctcgaactcctgacctcaggtgatctgcctgcctcggcatcccaaagggctgggattacagacgtgagccaccatacccagccctcaggcaggttctaaacgtctacattagacatagattcttgttcttaaaagtgtggtcctcagaccagcagcatctgcatcactggagagcaagttagagctgcagctgagtcctgtaccccaccctggactctgtgttggactcttcattttaataagaccccaggtaacgtgaatgaaatagaagagctaagctgtaaccaccatggtttattaaccacctgcatcagaattatctgcagtctggcttaaaatgcatgttccggggctttggtcccagctacatgaatcaggggactgtggacttgatcctgtcacctgcagcattaacagctcaggtgattccttagtggaattgagtgataatcatggctccagtaaaatctttatctgggcctgatttggggacttcctgacagaggacacctgtttggggatatttgggacatctcccttaaattcctctaatggaaagaatatggttccctggaaaatcctgagagcagggcattcaggtaaaatgccctgctttcactccaggtgtttgatcaaagataattcggggctcccaatttccaacagtcaggaaaaatgtcatctactttggcacatgctgacttaccttaatcaatcgcagtggttttcaagcttgaacacacaccagaatcaagagggcttgttatgatgcagactcctggactccactgtcccggagtctctgattcagaatctgcatttctaacaagctcctggtgtgattctgctgatggttcaggggccacacttggagaagtaaagctccatgatactgagtagcatctttctgtgaaagggaaatggagggtttggccatttctttagtgcactctggaacatgtcgtcccagcacaactgtacttcttatcagcagcagccacagagcaggctgacctggtagaacccctgtgcaagttatcactggaggaagaagacttgaacccagggatgcccggggctggccctaccaaatcagccacttctctgcctgctcccaaaggtctcatagacacagtttctaatgacttgtccttcagcaacgacctccaatgcttttcaggatcaattctctgattagcagtttttcttctctccctaatactgctgaggaatgtggcagtgtattctgatggccgcataagccatttagtaagctcccatacagaccaagagaggcctggtgagaaggggcacggttgctgtggaggactttgcaaatcctttgaatctctccttagcctctccctgcagttccaagaaagcagtgactttggggtttcatattcaaatgccagagaactcactttccacccaaagcacacacttggttttttaaaaagaaaaaaatgaatacaaaatagtgacttttcctgtggaccatttcaatatgatttgaaccgtcaataccaaccccctaaccccagtaaaaaaaaaaacagcccatgatccaggcttaaacattcatggaaaagggaatgaaaataagaataagaatcacattttatgatcaatttgaattttcatcaagaaggattttcatcgctgttacttattcttagtacagtcacagtcctgctaaaatgtattatcattgcagcatgtagagataactattggaaatcaagttcgacagactgtagatcaaattcaaaatccataaaacccaaaggaactggataactttgtaatgatatttaacattccacgaaatgagaaaaaaaattattgctttttgaaaggtcaagggaagcagtagcattgaaacaatatgaatgttcccctatatcagctgtgtttacaagttactgggcgtaggatttgtctagtctagctggcggacgccgccttgtaacagtggaatcatcttacatttgccctgctcttttaatgtttcaaaggcgtttgcatccattacttcatttcatcttctcagcaccctctgtccctttccaagaacggttattattctcctcattttatagacccagagtggttcagaccctgtcgctcagctcagcaaaccctgcagtgccagcctttttccattataccaggtccctactggcaatatattcagaatgataccacctttgctattctgttatgtatatatgagttgcacacacctttccccaaggtgcctgctacttttatctttcctccaggaccccctccccaagtggacacactgtttgcctgtctgcccttttctacattttgagattctctccctctctttttctctctccgttgtctctctttccctattcagctccctccctgccatccttccttatctatcctctttcatctcctcataaacactcctttgcagcagtggtttacaaatttcacttgataatttacatggaaatatgaaagggttctttctccaagtgtcttgcaattgacttggaatcagcgagttaaacaaaagggactgagcctctaactctgggaatttcaaggctccagttacagcaaatgacatgctgtcccctccacctatgtctatgcaggtctgccttgggaaccacctcacacatcagtgccttcgctgtccatctgtgtatgttattcaaattcacataagttaagataaagatccaggatgataaaaaccaatcctgatgggtgggattagagaattacttctttctgtagttaataacacaaagcaatcctgttcaggttctttggataagcctccctactttccttcttctgttcttgttctcccttagcccaaagcagcaagccaagatggcggagtactgccgactgatctttggggatgcccttctcatggagcccctggaaaaatatccagtaagcagttctgatgtttgtccttgaaggaatgtatgcattattgatgaatgaggttgagggaaaacttacttccttttcatatttatgtttcttggtaagattaatgcagttggtgatgaaatctttgacaaggaggataccagcaatgggccccactaagggtagaggaatgcctctgcactcttcctcttcccacactcttctctctcgctggctgcctgatgaaactcaatcaagagtgcagatttcccaacaattacaatcagcccatagagacagtccaagaggacaggcctctgctcactcccagggaacctcgtcacacctctttgagatgaatggattggcaaaacaggacactgcaggtggcacaatgtcttcttggcctgtccctgctggctgttctctatttccttggatgcaccttttggtgtggcacaactcaggtcgcccattgcattgatgatatctctgctttgggaaggaaagcagcagaaatatcctaaagtagcattttccttcccgcacccttttgcccaatctccatgcatttgtaagtgagtttataccagtccctccgctcattgcaagccaagaatagaggactaacttaggcattctatagattttcttaaagtaacctatcttgtggcttgcacacatgctctctgatacaatatctaatgaccccctcatgggaaattgattttcccgttagatgtacaaacttgaaacagtcaaaataaggcttgcaaatgtggtagcttgaatcttagggctgggaggaaatctgaagccacctcatccacttctgttgatgccagggacgtgcagctaaactacctagtaccaggatggggattttgctgattttaaggggcatctgaaaaaatgatttcatgggctcacctggaagcttctgcccgtctttaccaactcctcctggcagatgcctggcttccctccttcaaaaattcaggccagggccttcttatctgtcctaaatcaagatgattgggtttctatgttccattggaaaattcataaatgttcagatttagtacatcaaatctaccagtacatttctatggtcttcttcatgtagaatatgttgaaaaaaaaagtatagtaatgaaaatatatctttgatataaaaaaaaattagctcccatgtaagatacactaagagtttaatgagcagtgttgaaggtagggaagaagtctagacatttggtatccacagctgatctgggggtctggggaggggatctgaaagagggagcagtatttttaaagaatatgcctttcatttctattagctggaatctggagttcctcttccaagccctatggatttaatgtataaaattttggtgaaaaataagaagaaatcacacaagtcatcagaaggaagcggcaaaaagaagctctcagaacaagcctccaacacctacagtgactcctccagcatgttcgagccctcatccccaggagccggtgaggggctggtgggctctccccgtcatgttttgtgttggtttaagaattgctgctctgggctgtgcgtggtggctcatgcctgtaatactactacttttggaggctgaggcaggtggattatgaggtcaggagttcgagaccatcctggccaacatggtgaaaccccgtgtctttggtggccaacatggtgaaatcctgtctcttgcaaaaatacaaaaattatctgggcatagtggcacgtacctgtagtcccagctactcgggaggctgaggcaggagaatcgcttgaacctaggaggcagatgttgcagtaagacaagatccagccactgcactccagcctggtgacagagtgagactccgtctcaaaaaaaaaagaatttgctgctctgaaattagcttagaaggactttgaacattcctatttctgcacagttttgaactactggttttctcttgctgctacaaacttagcggcttaaaccagcacaaatgtattatcctctagtcctgtaagtcaggaagccccctgggtttcactgggctacactccaggtgtcagccgggctgtgttccttcctggaggcgctaagggagaagctgtttccttgctttttccagcttctagaggccacccacattcgttggcttggggctccttccagcttcaaagccagcaaggctgcatttcactaacctttctcctgtggtcacatctccctctgaccacaggcaggaaatgtcctctgctggcaagaactcaagtcattacattggatccatccagataatccaggataattgctcccatgtcaaggtctttaactccatctcacctgcaatgtcccttttatcatgcaagctaacatattcatggagcagagacatctctgggaggtcattattctggctaccatgtaagccaaatagtcttcagagtgaccatatgactttaagcttcataatgggaaatattaactatagaactgagcactggatgcattgtcattgatgatatgctgaagagttctgggcatttcaattttttcatgttttaaagaactttttaaaatctgtgacatggcaaaattacttaaattatcttttgaagctcctagaggatgcctaatatcatttcttttccttttaaattaagggtgaaatagattgctgtggttgatgagaaaagaattcagtggcactcatttccttgggattatttgtcatttagtctgatttatcttccaagttcagtcagaagcttggcaatctgaaaatcgcattatagacatctcctgattgcagggtgattaagtggaagaaacttttaagcttgactgtaggaagtttttcagttataagttaaacataggaacaatcaattggaaaactacttagcagtgtctacaaaagctgaatatatgcactccctgtacctcgggagttccattcctaggtatatgcttgctaaagatgtgtatttaggtttaccaagagacacgtacaagaattgcttaaagcagaggtattcagaatagccaaatactggacaccaaatactcgtcaacagataaatgaattatggtatattcacacaaagaaagaatatgcagccatgagaataatctataactaaatgaaaactatggatgaatcactataaataaacataatattgagcaaaggaagtcaggtacacaaaaactacatactgtatgatttaacctatataacacacaaaaacaggcaaaactaatttatgctatttattagaagtcaggataatgggttcccttggaagaaaagcaaccagcagggagcccaagagccttctagagattggttatattttgtttcttgatctggatatcatttactcagacacgtttatttggtgaaaattctttgcactgtggacttacgacgtgtacttttctgtacgcctgttatacatcagttataagattttaaaataattaaaatataaactctaggacaatcagggttaaaaaaaagtagcctgagactctgatttatcttttcttctatttttctgtctcaattgcctgtttttttattgtttcgattaaaatctttatcaacagacgttatataattctttgaaagggttttgtcctgtagcttttgaatgtgtactttcatcattattgtgcatgtctttcaacattttttcaaaaataatttctgtactcagtaaaaatgttctctttgaagtttggaagtgagtatcattaacaggcctttcattcacacctatttcctaacacaactctatccgttgaatgatagcaagcaaaccttgtcttcctttgcatgtgggtgcttgtgttttttaccatctgcctttcccactaccagttctctgcctcttattaacaggatgcataacacaaatgacgatttttacaggcagtgaacattattgcttaatatagagaaagggcaacaatctgttagttattcagtagatttcctaagctagccctgttgtctattatgcaatcagtggaaacttttggacattttaatatgtaggtacctgaataaagagcaccgctaatttaccatttggttcgtagatgttcacagtactgggaactcaagtaacttgaaaaacgtgacaggtattgtatttcaaagctagtttacttatcatggcccctgttggccagatgcctcttgcaggattcagccctttgctagtagacttgtcctaaggaactagggtaacctaagatattttttatagttcaacaagattcccccaacatccctccaaagatttacaggagaaaaatcaggtttctgctttttacagtaaagaaagacaaattctttctttcccacagacactaaagaatgacctgattggctatttgaaatgactgcgaattgttgggtcccatgaagtattttatagaaagctctgccaaacaattttttaattatttaattaaaagaatcccctctctgattttttttttttaaaaaaaaaaggtaataagaacttgggacaaaaatttcattataaaaatgcttaagtggcaataccctaaaagaatgtgtctctaatattgtagtaagatacgttttctatccaaaatataatcgattcaccttattaactaacacaatatcagcattataaagtggttgtatgtggctttccttaataaacaatccaatacataaaaacccttgctggtcccagaaatcttttttcccctggagatttttaagcaatacttttttcactactgtcattcagtaattgaactgtgtcagccaaatgaaaacttttataagcttctcagaggacagtgcagtggtactgtctccatttatataaatcgagtagggcagctaactttcagaaggctggcagtgggcaggggtgcaagttacttcattgttgaaccattattgccatctattgggctcatcgtgctattgcattgtgtgagccctgaaagatagtagttaaatcaatttagaactttcgaaccatttagaacaacctcgctgactttttacttgaaaatcttttttatataacggatatttctgggtctgactgaagcccatagctatggaagaatgtaatgcttcatactgatatgaatatttaacctagcagaaatgtccattaattcttcaggggaaaaacaattcatttaaatgagtgtatattggctacatatgaagctgaattatttctgatggagttagatttccaatcatgctgatatttaaggagttacccatgttatcctgccctcttaaaaataatatcagcattttctacgatatgcacttcgttgtgatgacaatacatccatcaaataagcttgcagacaaatcataggataaagttggcccttcacgatttttatgtagtgactttgctgccaaagccccagagttcctgccccagctcctaacttctttgacttctgcaaggtcctctctggccttgggaaaaatgtcaacacaagatcactgagctatgtgctggccacgcattgcatggaagagtcgcggcttgggaaaggagggaaagatgaaggagggatagatagtatatctgttttcggggtcatagagaccctgagagagtgtttgtatatcaaaatagaatacatgtaccatagaaagcaaactgtattaaatgccagcaaactgttttcaatgccacgtgtttaaaaacatatagagaaaaaatattgacacgcattttttaatagaattttgaaattttaagtgctatttattaacaaatccagtttaggaaaaaatctatattcaaaatgtcagtataattttctataacgaataaaatttaaatccttgaaaaaaataattttaaacagcccaacttccaaggaaatctgtaattgattttaggtaaaatatgtgttacaaatgctgtaaagctaaatgttgaaatggtgacatgatgatctgttattaaaatttgacaggagaagctgatacggaaagtgacgacgacgatgatgatgatgactgtaaaaaatcttcaatggatgaggtgggtacttagggcttctggtccctaaggcattccaccaccctgtactctcctgggtctgtctcatggtcactttctgccatctagtggcaaaaagtagatttgtgccttccaattgccagcttcaatttttgaggcaattaaatggcttatgaaatgttccacaatccggagaagatatggcgtttagaaaaatgatcagaactgtgacattcattgcattgttttaattttggaacactagagctacctatttatataaacttaggcatcccgagtaacttgattagctcaaaaatattaattgcacagaacctagaagagaatcagaagcagatcaactggaattttagaattttgtcttaccaaaagtttatactgaaacaatctgggcaacagagagagacctcacgcctttaaaaaaacaagttaaaatgaaagataaaacacatccaggtgcagtggtgtacacctgtagttccagctactagggaggctgaggcaggaggatggcttgagtccaaaaatttgaagctgcagtgagctatgatcacaccactgtgctccagcttagaaaacagagcaagacactgtctctctttaaaaatacgtattttaaagtttatattgaatctgctttcaaatttgttagatatgttctgtctcaacgcttgtagctctacaatttagtaaaaatgaaacaaaaaataagctgctcttacttgatgtccttcctcttagaattattttttaatgtctaaagttttgcttaattatgttccctcactacatttcaatttttgatttccaggaggaaaacagcttaccatgtctggcaaagtatatgttcctgagaatgatttcaattgtgtataatttctgatcagtgattctaaataatttttaaactctcttactaattggatagtccatttgcaaatgaatgtttcccagttaacatttgacccaaatattactaccagaatttttaaaagaaactcatctccatgcattctctcttctaaaaatgtgagacaatattagatcactctacagaggcccattttgtgccaacactgcattattggttttctttttcattaaaaactctatcaaagtaatatgtcatagctaataatagcaaaagcaacatgagattgtagtaccacttgccaggcactgttctaagctccttcacataaattaacttattttttaatcaaaaacccctatatgctgtaggaactgattttatcctaattttacaaatgagtcaagtgaggcacagagcaattaagtaagttgcccaaggttgcccggtttctaactagtggacttgggattcgaaatcaggcaggctggctctagaacgcgagccattaatccctgcactatgctttcctgcttgtctaagacacatcaggagccaagaagggagggagggaagaatgttgatgaaggaaagcagttgtttacccacccctgcccatttccacaaagcaatctttttattattattatcaattttcccttcatttggtggtcacctacctaacaattttcttattgtacagtgaattcttaatttacgaatccgatgagaacacatggacacataaagggacatggggcctacctgcgggtggaggtgggaggagggagaggatcaggaaaaataactaatggatgccaggcttaatacccgggtgacaaaataatctgcacaacaaaccccagtgacataagtttatttatataaaaaaaaaaacctgcacgtgtagccctgaatttaaaataaatgttaaaaaaaattactaaccttagacaacacctatggacaccctgcaatggaagatgagctatagctcagtgcttctcaaactttgatgggcattccaatgaccttagtaaaatgcaggatctgagtctgaggcctgcagaggggctaagatcaggcatttctaaatggaaaggagggggcaggggatagggagtgattatgttggggccatgctgccagccaccattcaacctcccacctcccttcctccctcccttttataaaatgaggtgttgctgttgcctttctcctgtaatgaattttcattttgtaattttcagaaagggagggatgattttctgcatgcttgaatcatgttgtcattttcctgggaaaataactgataatataatgctgactctggaaatgttttcttttttattcctacttccaggggactgctggaagtgaggctatggccacagaagaaatgtctaatctggtgaactatattcagccagtcaagtttgagtcatttgaaatttcaaaaagtaagttttccctggagaaaaacccctcttgcagcatataatgattatattttaaatacggagtaatgggaccaaagaatgttacccttaatagagagatttatgcttttgaagtcttaaatatatgtacattttgactgccttgttactttacacatataataaatatgcatgtattgtaatatataaaaataaccatatgagaaagtattctatggtgttctccaaaaatatttaatagggctacaggccatacatggctatcggaaagacacatgaccagagtacaactaattgggaattgtactttgctttttgttcgcaacacacagtgagatccatctgttacataagtgataatgttgaaataaactatctacctgtttcccagaagggaagcaggcagagacttgatgaaccctgataattagaaatagaaccaatttatctatattccatttgtccatcacatgtatatatttagaagaaaatgcattaacttcacatcactttgtgttttccctttattcaactatacatccatacttgtgcaaagaaaaatatcatctttacccagacaaaagggttcttttatgaaaatgccccttgtatttgcatgaagcgtaagatgctatcagattaagggaatccttgaaacttactagccacttataagggtgtacccttaaaaacagaaatttgcctaaatgtactagcttctaatcaaggatggctttgcagctatatcaaaatccaagcctctaccaaacacgcttgtttatatttgtataatcttacaaaaagtcttcacttagtggtatatgcaacctagatctctacaacaaagaattcaacttccaagagtttatatataatgatttctcaacattgaattcgatgtcctaatttctgatgtttcttacaagttgttttctttgaaacatcctagcgtagttatttttatatcactgtaatttcattggctgcaatgagtttctctaactcattagttaaaagttccaagacaagtagccaagtgtgagaaagagccaatatatttagattcttcagaacctggaaacaacagcaccagctagactcacaaacaagcacttttctccttgtgtttaatatcattttataaccttgaaaaaagaatattcaacatattttaccaagtacctattaatgttgactgaattttaattaatagttatgcttaatttaataagtcatataaaggtagatttatgatggaccaaaataagagaagccaaggtttgccttagagtggattggagaaggtgagaagatggatgacgaagcctggaaatcattaagaagaacgaggttttaatttcgaaagagaggtcaaagagggaaaatatctcaaagataactcagtttaaaaaaattcagagctatataaccaccctgtgctatacttatctaaaatactgctcataattgttggtttttagtggggatgagggtagagaaagtgattctcggtctttctaaactaagataactttgttttctttctctcactctaattggaggcttgaatttcactttcaaaatgtttctcttgtgtttagcacatcctcctctctggcctctattttattttatactttattagtccattctcgtgctgctatgaagaaatatccgagactgggtaatttgtaaagaaaagaggtttagttgactcacagttctgcatggctggggagacctcaggaaacaacaatcatgaggcggaaggcacctcttcacagggcagcaggagagagaatgagtacaggcaagggaaatgccagatgcttataaaaccatcagctctcatgagactaatgcattatcatgagaacaacacaggggaaccacgcccataattcaattacccccacttggtaacccccccgtgacactgtgggtattacaattcaaggagattttgtgtggggacacacccaagccatatcatgtatctaatatgaaaatgaagccatgagactggaaaatttccaaggacctttctgttttgaaagaccataattctgtcatattagttatttgaaccaaaaaagtatatacaaactgataaggtggcaatgtgggtatgaaagagatagtcagcacctagcacaaacattcccatggtctcttttgttaaaccccatattggccctaagaaaaaaatctgggtgaatttagaacaaaagattcccacggggtccctgctcttttgacaaatttttttattgccacactatactcatctagaattcattcatgtccctaaattacaaaagcataagtagctctgacccaagtagcaaacgttagaaaagacaactaacaagactcaacttttgttacaggtaaatagtgcactagaaaaaaaaattaaatattgaaattacattgaggattatttgccctcaacttcactgaatatttacccatttcttttataatgttataatttataacaatgaattgtatttctcaccttccccttttttgttttgttgttgcttaactcagaaagaaataaaagttttgaaatgtcttccttcgtggaaaccaaaggacttgaacaactcaccaagtctccagtggaatttgtagagtatccttgatttgacgaatgactgcagaatgaacacagctgaagtcttgtgctatttgttcatttggttttttaataaggagaaagatgcataaaatggcttaagtatatagcctggggcggataaatagtttcaggtatcatatacaatgctgggcggggtagtctggcctatagaacaaaaaactggtcttggaataaaggaagcgtagatttcaaggttgccttcacaccaccaagctctgtgtctttaggcaatttgcttaatcctgactttccttgtctataaagcagaaataattatactagctttatggtttgctctttggattaggtacaacatatgtaacatgagtgtgcatactttacacatatataagatatatgtaaagaaatatatacctgacttggcatctcacatacttatatgtactatatgtccaaatagtagggatgatgatgatgacattgtaaatataaatatacattactaagactggatttattgatattactgacaacaaaaatttttgctactatccatgaactaaaataaagtgaaacaggctattaaatttctttcataaaattaacagtaaatatcacaaagtgctcaatttcatgtaataagtcccagaataaagttaacctttaaaattcatcagtggaagaagaaacaaatgttgactccataaataaagtcctgctagaaaattatcatcgttagtattccttattgactgtgtgatagatcttgtcttatctcatttaatcctcacaatagtcctatgacatagaaattgttaaatctattttatagatgaggagactgagtcacagaaagacaaaataatttgtccaaggttattcagctagcaagtttgagagttgaggttcaatttcattttgcctagctcagaaccctaaccaaccttcacctaacttggtgataggaactagtcagtcatgttttaaagacatagcatggtccaacaactacaagattcttaggatagaaaactgatgatgataggaaccaaaatattaagcaagatcagaaacttccatggtacattgaccttgctatcaattataaagagtaccacagtcttggcaaatagcattcccagagaaaattaataaaaattagcagacagcatttcaaaaatagctatacagtgcatattatctacttctgccaaacacaatatcattctttcaaatgatttaacacattccagcctccttgtgtgtccttagtcattaagtctgtccttaatactctccacaaaatcacattgactttggctcagccactttttgctaccccattgacttttacccacggggctctgcaaaggtgatgctatgcctatgtgataagagcatacttattctgtttgtttagaaagctttttgcatatttgatattactgacaacaaaaatttttgctattatgcatgaagtgaaataaaatgaaacagcctatttaatttctttcataaaattaacactaaatatcccaaagtagcccaacgagatcatcaatatttacttcattttccaaatggagaaagatggaaggtagcttcttagttactattattgactaaatatttttataattgtattcactacttaacatgatggtccagatataacaaaatgcagcttagcaggatatatccaaaaggaacacgtgtggattcatccaactatatgcctcagctcttctggaatgcaggttgtcagatggtggcacttaatttccagacaatgggtaagtacatgcttgttcccattctgctatgaactcacattgccaagtgtccaaaaaccattcttacataattgggggagagaaaattgccagacttcactgaaaaaataaataaaagcaaatttcaatgaagggaatatcaatgcataaaaaaagtgaattttgaaaatcgagacatgttcttcaattattctgtaaatggatctttatttctacaggctttgcattatttttcaaacaaaaatttttatgctttttaagataatacatatttattttgaaaataatggaaaattcagtaagtattttaaaaacaaactgccaggaatgctaccaactcagagattccacagtgttgacttttagctttgtaatctatgtcttttttgtctacatataaatgctttttttatgtaactactcatttaaaataaatacatatatattcatatatacatatataaacacacactcacctaagtgccatagagagacatgaatttcaatagctgcatactaagcatatttcacaattcgctaaaaacttatttctattccctaaatttcttttggaaaatattttaaaaacagaattactaacgttaaaagatgtgaacagtttaagtacctttatgaatattgccaaattgtctgtaaaaaatgttgtgctacattactccgctgtcagcaatgtttaatatgacgtggcctctcatttgcgatcttggttaagtattatcgttaaataataataataattaaaccagacaaaaatgtgttatttcactgttattttaaattcatttcttgaatcattattaaggttgaactttttaaaatatgtttcttggtttttgtatttctgcttttatgaattacatattcaggactatcgtcaattttcttgttgatttataacagcactttttatttaaagggtatattgtcttttgtgaaacagagacaattcagtggatcaggtcaggctgattaatgtttaattaaaagttcttggtttacttgtatgattacagcctcctcaccccaggatgaaagccttgtgctcccatttttctcatggtttcttttttatttaaccttttcaaccatcaaaatttaattttggtccatagtctcagtgagatcaatccttttttttcatcctaaacaatcatcccactgaactggaattacacgttaatagatacagcctttttcattgttgttaattcagacccattttttcactttgtatcttttccattaataaatttgtctgccttcctggatgcaataactcactgtttttactgtattttataatatggattaatacctggaagtggtgattctcctttactactattaattttcaattccttttttgccattgccagtggaattcttatttcaaataaacttaatttaactgtattatgttttccttgactactaaaaaaaaactatttttaaaatcatattaactttataaatttatctgacaaaaactgacacctttttaatttttagtttttctgtcacaggaaaaatgcttttctctttactttaaaattttttgtattaagtcctcagcaaaatcacttgtcttcattagaggtctagttttcttagactgaatctttctttttatttatattatatttttaacagattgtttctggatatttatatttgtatatttgtttattttataaatgattgtattttacaaatgatcatctttctaaactcttataatagcctattttttgcagtacattccgttggaatttttagacacacaaagacagtaatttaatcatatctcatttctccacctgccttatttattgctttggccttaccgttctcaggtattaaatgagggttccgagtgggcatctttcttttttattcagtaggaagttcaacattatgccttttattaagtatctatcaagctctaagccacgattaagagtaatttgctagatatttatggctttttaaaatcaattaatttatttttattgatacataatagctgtacaaacgtttgcagtacgtatgataatttaatacatttatataatcaaatcagagtaattgggatatccatcacctgaaatatttatctttacattagaaacaatcgaattgctgtcttctagctatttttaaatgtacaaactattaatgttaactatagtcacctccttgtctatcaaacaccaggtcttaacgtcttctatctaagtgaagagtgggcatctttctcttcatcctgatcctaatataagtttcactgttgtgatatcatcaagtcagatattggctgtgactttgagtcagatattctttaacatactaaaggacacgggtcctatttgactaatgttttagaagttggtattgaatgttattaaatgtctcttggacatccattgggatgatcatatgttcatttttcagacataaatgtgataagttatcttaatagatctcatttcctaatatataattatccttttgttcccaaaataggctctacttatttgttgtgtattatttttagaacatatgacttgctaatgtaatttttaggcttttgaagctaattttttcaagtgtcataaattcattattgttttgaaattttgtccaattttgacatcatagttatgtttataaaataatagtttaataagagagaaaatttcactgatttttttctgctctaaaaatgatttgttaaatgaaactttagaataattctgccatcacctctttattatgcacatagagatgagtcatgacacagataatctggaactgttgacaacttcccagattctttacaactttaatatgtattctttcactctatcagttgcaatatgtgtgaacgttcatctgatgcactgagtctgaggaaaattttgaccagtaacctttgtccactggaaaagagtctatgtagaattagatgttcattgtaagtaatcacagaagtgcaaattataaaaaagaaattttttgtacaaattaaaaagcaggaaaaggaataatagaatcctcttttaatgaggcatggagaagtccattctcaaaaacatggcttagtagtataagctggtttaagctttctgaagggcattttagcaaggcatcaaagaaaaattttccaatgaggacatcatttgtcccaggaattcctctcataagaaaatcactgatcatggcttcaaagatttcaccacaatgatgtttatcaaaacattataagggtgaaaaattagaaaaaacataaatgtgcccaaaaggggaatggttaaatacattatattctaatatattgtattagatattatattctaatatattgtattagatattatattctaatatattgtattagatagtgtatcatattagaaattagatattagaattagaaattagaaattagatattagatattgtatcataatattctaatatatgctttatatattagaatgatatatttaatatatcattctaatatatctaatatatattagaatgatatatttaatacattagatattagatatattagaataatataaataatatatctaatatatgttagatattagatattttgtatatactatatttatatataattatatattatatattagatatattatattatattaatatttaacatatattatacaaatatattattctaatatatttaatcaaaggaatttgagacagctgttataattaaggcagatacatattaaatgaaatcaatatactgtatgtcaacaatatatttgaagtggaaaagcagactgcacacccaccagttggcagtgattatttctggacttggggattagaggtaatttttttcttatctgtgtttcctgcatttctacaatgactctcttccaagggaatacagtcacaaaagtggactgggatcaactttactttacaatcttactttcttaccccaagtatagataaactcacaataaggcttgtgtttttgatactcagacctggctatgcaaataaatatggggatgtatgaatacaacgggaagagtggctacagattgaagccagagttcatgaggaggcctgacaagcattttgatccatttactgaaggcatcgtagatgggatagtggcaaacactttgtctgttaaggtaggtataccccatcacaaaattgttcctaacaatagtgttgaatttatctacattgcataaagaagtggcttagtcattaaaaatttagtaactaggaaagattctactttcttcctacattttttttctctaaagatcaaatacacattaaaagttttcgtaaggggtccgtgtgttctcattgttcaattcccatctatgaatgcacacgggaaggggaacatcacactctggggactgttgtggggtggggggagcggggagggatagcattaggagatacacctaatgctaaatgacgagttaatgggtgcagcacaccagcatggcacatgtatacatatgtaactaacctgcacattgtgcgcatgtacactaaaacttaaagtataataataataataataataataataataataataataataaaagttttggtagggtcgggcgcagtgactcacgcctgtaatcccagcactttgggaggccgaggcaggtggatcacgaggtcaggagatcgagaccatcctggctaacacggtgaaaccccgtctctactaaaaaatacaaaaaaaaaacaattagccgggcgtggtggcgggcgcctgtagtgccagctactcaagaggctgagacaggagaatggcgtgaacctgggaggtggagcttgcagagagcccagatcgcgccactgcactccagcctgggcgacagagcgagagagcgagactctgtctcaaaaaaaaaaaaaaaaaaaaaaaaaaaaagttttcataggccacatgaataagataaagcgactgaactttattcttaatgataaaaatctgactctaaatcaataaaatgagttggagagactcatcataagcaaacctcttttttggtgtaactaacctactatgaaatttacatgataattagtggcccatattggagagattttccggtctttttttccccgtttggttcttagaaaattagagacagaacattccctcaataaattatcaaatgttaaacaaaagctttcaagttactttaaatggtttttgaaaatcttccagagtattcagagattttaaaacacatattaatgatcattaaataaaagagttgctttattaaatatatatgtatatatacaagtatgtcataaatatataaaaatcatagatatatacacatacatatgtatatctgaccctaaacaattctaaatttttttagtctttgaaattgattttatatcagatataattttttagctaccagaaaatatttttaatactatgaaaggaaaatcaattttttagaatacattttacatggattcttcatcgttaaagcttttcaaaaatattgtctgttttctgtttaactgaataactatagaactaagaaatttttttactggacataaatgtaattttttgattaaccttaaacaaaggcatttgaaaaactatgtaaaaagctttctataacagcttcactaatttctttctaccctaagcagttgagcacatttttaccataaaactttcgtcactttatatcaagggtttaaagaataaaatttcagtgaagtgtctcataattatatcttttgaaattacttcaagccacatgtataaagagttcaagttggcagaattagagtttattttaggaaagtattttcagaaaaggctgtttaattcctgtcaggtgtgataaagataaactcataagctccatgtactgatagaatgctacttttagaatccttgtcaattgttgttatagttcggttgaattaataatatttttgctttgcttgcagattcgtcttgttttgaatgtatttgtttgcttatttctttttttgtcttgaaaatcctactgtgacagtaagcaattataaaacaatgacacagaggcaggaaagtacattgagttgtgaaggggaaatagttgatccccagacaagtgtaacctgctgctcctgtccagaatggagacgctgctccagagctgtcagtctcccctgaatggacagttctcactgcagtagagtcctacctttgacattatagctagagccaagatacagatcataactttccaattatgcctttgttttcatcttctggcatagattttataatgccagaatggacttgtgagctcacatgatgttctaccgtcctatgttactgacgagagcattgtggttttggtgtcatgaatttagtttaggactctgctttggtcaaacatcttaaacatacaacatcttctgtgcatctgaattccaagtaggacttgcataacttagaagtttcaaacatgttttgaaatgcttgcttatttcatagacatagttctcacatagaacctcaagttaaacaaagagattgttgctagcaggtcccatgcactcaagccaaatagaacatacaggggaaatgagttgtcccagggcaaattcagagagccttcctgatgactttctctctgaattactcagaatttctgacaacatcagcatatagctgactttgactttactcagcctttgatagctattctcatgccaccattttgtctgatttctggcccagccataattctgtcccctttcacaatcttgagctcagattgtgagcccagccataatgctgtccccttttcacaatctggagctcagaaagttcttgaccagcaggcaattttcttgtaaccacataacccagattcaccaggtttgctctgtcagcacttgcttcctgctttccccttcctggtatacagcagaagcacatcttgtttgcctccgctaacctttatgacagctggtggatagttcagattttgaaaatttgcatagaaacagaggcagacatggaagacatttataaatacgtaatattaaaaatctcttttaagtctataatatccattagttctgtagctagacaaagatggtgacaccttgtgagattaggggtaatgataaacttatcttgatggtttaaagtgaatacttgttcatttattcctcctacaatactgtgtcttattaattgactacttctaacctcaccattttcaatatccttctaccaacctgtgtttgtccattttcacactgctataaagaactacctgaaactgagcaatttataaagaaaagaggtttaattgactcacagttctgcatggctgaggaggcctcatgaaacttacaattatggtggaaagtgaaggggaagcaaagcacacctcacatgaagggagaagagagagagtgaggggggaactgccacacacttattaaaccatcagatcttgtgagaactcactatcatgagaacagcatgagagaaaccactcccataatccaatcaccctccccaaatatgtgaggattacaattcaacatgagatttgggtgaggacatagaaccaaaccatatcacaacccattaagtgaaagggaagtcatatttctactcttgcttctattccattttgcttataattcaacatttgctgaagagcatttgtggctctttaaagtattctcttatgtctttgttatttgcatatcaaaattccttatggattgattgatttattgattttctagattatttcaggtcagtttctttctgataagaaagttgggacttacgtggaagtagatatgtttggtttgcctgtggatacaaggaggaaggcatttaagaccaaaacatcccaaggaaatgctgtgaatcctgtctgggaagaagaacctattgtgttcaaaaaggttggtcacatgttcttgatatgagttataactgcatttttcaggtgttttacactgagaaaataatgaaatggtgaattatttgttatttaatttgaaaatttacacacttataaagcaattaccttttgaaagccattctgaaaacccttcaagaattctgttaatcactggtttggattttcagaattgtattgtaaatcaattcattctagtatgcctcaaatggacggccataaaaacatatacatttaactcatatcatctgatagtacaaatgataaatgatacattttaattataactcaaagaagtagagtggaagtagggaataatatagtggctgagataaagaaaattcatatttcctttaaaaggaatattatttaaattccccaaaatctctagcctctgagagctggtcattcaatcttgtctgggttctatctaataaagttgaaacctttcacactcaactgggcccttctctttcttcaccaaaaagcaaatcttcacacatgcttatcatgtaaaggaagaaagtaggttcagtgggaagtagactttttagcctactctttgcttttttctggccaaaatatctacaaatccagtcttctgcaaagagaatagctatgcggaaactctctgtgctctgggatttttccatatgttaactgagtttaataataatgcttactatactgcttacttcttacagttattatgaatattccataagtaaatacattgaccacacttaagaaatatctagcacaatgaaaatattcaataaatgtgagtttgctgtttttgtaaacaatacatttttaaagagatagtcgacttcatgttcttgacataagatataactgcatattttagatgtttcacactgaggaaagaaatgagtagttgctctttgcttactgtgggaatttacaaatttataaagcaattgtattttgaaagctgtcctgaaagttattcttgtttttcagtggtggttgttttcactttttttgctttcactttgaagatgcaaaagtcatttgctttgaaaacataaacgacttccacaatggttgaactagtttacagtcccaccaacagtgtaaaagtgttcctatttctccacatcctctccagcacctgttgtttcctgactttttaatgattgccattctaactggtgtgagatggtatctcattgtggttttgatttgcatttctctgatggccagtgatggtgagcattttttcttagtgggtgcagcgtaccagcatggcacatgtatgcatatgtaactaacctgcacattgtgcacatgtacccaaaaacttaaaagtataataataataataaaaattaaaacacaaattaaaaaaaaagaaaacataaatgaaatattcacatggtgataaaaccactaaactctttttgttgaaagatagaacttttgtcatttccacattgagaatgttcatgtaaaaataaaacagcctatttttttaacaaatgcctcattaaggcaaggtgataaaacatagatgaagccctatctctggcaacccatgtcttctcctctgaaaatgaaatttatagggcaacatctcaactttttgtctaaagtagctaagtagaaacttctagttggatctgaaaagctggtcctggccaggcgcagtggctcatgcctctaatccgagcactttgggaggccaaggtggtggatcacctgaggtcgggagttcgagaccagcctgaccaatatggtgaaatgctgtctctactaaaaaagtacaaaaattagtcaggtgtgggggcatgcacctgtagtcccagctacttggaaggctgagacaggagaatggcttgaacccagaggcggaggttgcagtgagccaagatcacgccactgcacttcagcctgggtgacacagcaagactctatctcaaaaaaagaaagagaaaagaaaagctagtcctgattgaataatacctttctaattatttcttggaattgttcattcttataaccaggtgtgtccttaatgtcctttgtaggtggttcttcctactctggcctgtttgagaatagcagtttatgaagaaggaggtaaattcattggccaccgtatcttgccagtgcaagccattcggccaggtatgggtagtgtgctgagaaaccttttatcaaagttgcaaagaaaatcattactgcttaaaatattactagaaaatgacttaagaaactattttctgctttgtaattttgttatgtaacaagggcgatgagatttagttacatgtttttgtgacatgttgtagtattaatgttagtcaactctttcaacaataattatgtgtaacaaacaatctgaaaacttatatgcaaatatttatcttcgtgctcataggtctgtgggttggccgggtttggctaatctagcctgggctccgcagcatagctgtgcttcaggttctgggttgggtctatgtctgtcccacatgcgctcactctggggtccaggctgaagtggcagttgcttctacaatagggacttctcttggcagaacactggaatgtctaactctgcatgtgcattttaagcctctacctacaccaaattactaatatactgttgactaaagcagagcttaagcacaagtcaagaaatcacgtcaaggctgggcatggtggctcacgcctataatctcagcactttgggaggctgaggcaggaggatctcttgaggccagaagtttgaaaccagcctgagcaacagaatgagaccctgtctctacaaaaaataataataacaattttttaaaaaaagaagtcatgtcaagtataattctgttatgggggcaagtttggatcaataattcagtctatgacatgtgatttggaattatcttttgtgggaaaaatcatacggttggaaaggaaaaaatcacattgaatgttttcttgtctgatgagaaaaataatgccttatcattcataaatgttattaaaatgaaaaaagtgatttgtttttcatctaaagtaacctgaaatacatgctttcatcacatagatgcgcataattataactaacattggaaaggaaatatgtgctacacagcattattctcaccttccaggctatcactatatctgtctaaggaatgaaaggaaccagcctctgacgctgcctgctgtctttgtctacatagaagtgaaagactatgtgccagacacatatgcaggtaaacaacttaactcaaataccactttactcaaaggggtatttctgtctgagtcaccatatatttttgggttagtgaaaggaaaactgaaccaaacaaagcaggagattctggcttcagaatcacccctactttcgtatgtatgtttagaggtaaattgcttgagccattgtgaatacattttaatttaacgtattttaattaaaatcacaacacctcagttttttgaatatttattcccttttagtcttattctcatgggcccagcacttaccaactcatgttatccattacaacaaatgtctaggtctgtacactgaatttgtcttccaccaattttagaatgctgattcttttcatgggtgacatcctaaatttaaggaattaaccaagaatcataagtgtaaatgcttatagtgccaagtagcttgggtgtaagacactggggagtagtggagaccatggtaagcttggggctgtccatccaaagctggcagccataactcattccagctaggcactgcccttcaaataactatattggcaaatcattgggttatcccaacagtccggaaagcaggctttttatgtaaaatgtctccatttatgaaacgtcatttgggccaaataggacaattgggtgggccattgccggaatggatgggaccttcaaaaagaaactaaggaatcaagaatattcagggatcctgagttgaagcctgtccagtttgactctcagaactaaactcttaatttctctcttcctgaagtttcaacagagtcctaacccttgtccatgttcaaagtgttggatagaggagtagatagttatatgggtagacagaagaatggaagatggataatgactgggtggatggatggatggatggatgggtgggtagatgggtgatgaatgaatgcatggactgatggtcagatagatgagtaagtagatgaatgatggataatcaatacttccaggacctttgatctaaaatatctcttccctatttagatgtcatcgaagctttatcaaacccaatccgatatgtgaacctgatggaacagagagctaagcaattggctgctttgacactggaagatgaagaagaagtaaagaaagaggtgagagggtgttttaattttacatatagcattaagcatgatcaccacacctacttgttggctttgcctaagtaatatcacataccttgggagaaggaatagcacattggaacaacactttcatgcagtttagcatcatgtcacagaacatctagatgattgacttaaatttttcacatttcattttcttttggcattctgtggataccacgagcatcttatcttgtgataaaattaaactgcacacatcttgctatttcagatgaaactttctacatgattccatgctaattaaaggtgatgagcgcatttaaaaaggaagataatcatcaaatcatttagggtttccctttgtctttaatgtagcatgcaggattttcaaagtgcttttctgatttttatagtacataaaatatttaacacaatacctggaaaatagtatgagtcataaagagtctactgttattattagatggtatatttatgtattataatgtgtgtcctgcaaataattgatatattattccaaattagatgtcacaatgcaaagcataattaaggaagggtctaaaaatagtagaaatgaagtttaaatttataaagcttctatgtagactggcagtctttttgcttttaaaaaaagtgaattataacttgattattaagggtgacactaatattaaaaatagtgataaaaatttgctattttcatattttattcagaggaaaaactcgagaaaaaagatagaaaatggagaactgtcagtattgggggaaaaaaccttgaaaattgttttaataagtataactaatagttatccattaaatagtccatttaaatagtctattaaagttgacattgttaagtaatgtttttcttatttcgaaagcatcctcgatttattatagaaaatttaaaacgtaaaaatgacaaaagaaaacaacaaagaaatcaactgtaattcaaacatcccatccgctcagagatagccacattaaatgtggggtgtatacatatctagtctttttatgcacaattgttactctttcataaaatgggataatattcacagtctgtgttttaagtgaaaataaaagtattaagtatctcattgcccatgtcattaaatattcttctatgacatgacttttaataactcatagccttctatcatatagctccaccataatttaattactaagtccccaattattggatatttgcaatgctgcactattttattttatttgtgggtacatagtaggtatatatgttacggggtgcatttgatattctgatacagacatactgatttttgtacactgatttttaatcctgcaactttactgaatgttaatcagttctaatagttagttggtggagtcattaggtttttccaaatacaagatcatgttatctgcaaacaggaataatttgactttttccagtttggatgccctttattttattttcttgtccagttgctctagcttggatttccagtagtatgttgaataacagtggtgaaagtgagcatccttgtcttattccagatctcagaggaaaggctttcagtttttcttcattcagtttgatactagctgttgaactgttatatatggctttcattgtgttgatgtatgttacttctatacccaggtggggtttttttgagggtttttatcagaagggatgttgaattttatcaaatgctttttcaacatcaattgaaatgatcatatgggtttttttttccttcattctgttgatatgatgtatcacattgattgatttgcatatgttgaaccatccttgcatctctgggataaatcccacttgggagaatcatagctcagtaccttgcttgtggtgggcaacttctatgttgcaattcatgctccagagaaccctgtgggatcagtctgagactggagtttgcctgaggccacatttcgacttatcttcttccctgtcttaacctgcttgcctcacctccctgcagttttttcctgagaccattctctcagttactcatgtgctcaacatgtgctcaagaatcctcatgtccacttctgcttctagggaaaccagcaatgctaagtagcttgctgttttataaataaatacaagaatgagttccctatctgaattaattcttaatcaaaattaagaatttaaatatttgaaaatagttacatctctcattctgatatttcttcagttataatagtgctttttctcttttccatggcctttaaaagattaagaaagactgttctatgagtttctcattttactcatatgaacatcagtatgaaattaatttctctttggaaatccaccaaaggttctcaaattcttttctctttttcctgctttacttaatagcatatttaataaactataattaaaggtaaagataatttacatagatacaaataaatcactattaatatcattcttctctaaatagaaaacaggacctattaggtacaatgcatattacctgagtggcaaagttatctgaataccaaacccctatgacacacctatatgacaaaccctcatgtgtacccctgaacctaaaataaaagctaaaaaaaaaagaaaacagaaatgtcctttttcaactggatgaattttattctgtaagaaatagaggttaaacaaaagcattttcaagtgaaattacatgtattttcagtatttagaggaaatactttttagattatcaactttaacccattagttagccattgtctctaaggaataagcacttgcttcaagagaacatttcaacactaccatatttcagcctactttttctattgtctgactcacatgttcttgtgagtgagctgaaatttatctaaaattgtttcaaatagctgggtgtgctgacacatgcctgtaatcccagctactcgggagcctgaggcaggggaattgcttgagtccaggagacagaggctgcaattaactatgaatgcactactataccctagcctgggccacagagaccatgtctcttaaaaataaaataaataaaataaaataaaattaaaataaaataaaataaaataaaataaaataaaataaaataaaaaaataaaattgtttgtaaatatttcctgattcagtgtatggccccgattcgatatagcaattgagctaaaggtctcataatggaacattttactaatggtgcttcagagatcatttctgtaatgactaggggaaaatgtcactctaaagaatgagagacataaggcctttgaggttgtagggctcttttcacaaattgatgtcctttggaaaccttatctttgcaccatcaaaaagttattttaggaggataaaatgtacaaaaatacagaagtagagttttaggtcaatcttatttttgtttttcttttcttaaaggtgatcagaaagcatttttagaaatgtataatattgtttaaatttggacagtatttggacatttttcagttttagaaaaaattttagaggcatggaatcacatggagtctatattggtctaatagagaaaatatgattttttttcctttgacatgtctaaactcttaactggcctcatttttacaactcaaggaaaaaaaatcatttgcccttaacatgtaatgctaggaaagaaaagtcatttcacactttgagcatcagtgtgtcttttttcttgtcttggaataatgtaagtttgtttgaatgatgccactgaaaataagtaactgtggttttctctaaagaaaattctatctaggacatggcaggcactgggacactgttttagcagcaaagacttttttagtatcatcattttaatgtgatgcttgtaaaggtcatttctatttgaacattaaaaatgtcattggactgcaaaatattaccagatgtttaatagtcctgtaaattatctttttagagtaatttataaaccaaatagataagaaagtggaatttcccccatgatttgaacaatagatatttatttcagataaggcaaaaatacattattcagattatattatacatatattatgtgtataatatatgtataatatttaggttatgtattatctgaataatggttggaagttaaggaataataaagattcgttattggatttattttgtctttgtaaattcagagtggtagattagtcaagttgtagagtaagtgcctaactgaatcctaacaaagtataacattcacagttaattcctttaaataaaaagtcacgtagaaaaatataaaaacatagtaaactaaagaaataaaattttaaaaccctctaattctgcaaatactggtaacatttttaatgtatatccttctagcatgtttcctatgtacatttttgtttgtttgttttttgagacagagtctcgctctgtcgtccaggctggagtgcagtggcatgatctcggctcactgcagcctcggcctcccgggttcaagcgattctcctgcctcagccacccaagtagccgggactacaggcacccaccaccatacctggctaatttttgtctttttagtagagacggggtttcaccatgttggctaggctcttctcaaactcctgacctcaggtgatccacctgccttggccttccaaagtgctgggattacaggtatgagccactgtgtctggtctctgtgcacattttttaaaataattttttaaatgttttacagaccaaataatgtaattacagagatgcctagtgaaatatcataacactttttttctatttttaaaatacctataaaaggaaaaagtaaatatccaatacatttattaggaaatattatgtgataatgtcataaatgcaatatttgaatatgacttttttaatgttagagaagtaaagaaaaaaataatgagcatttactgagtacttactgtatatctgacactatgttgagccctttattttatttttcttttctcaagacagggtctcaatatgttgcccaagctggtcttcaactcccagctcaagcaatcctcccacttctgcctcccaaagcactgagattacaggggtggttcaccatgcctggccatgaagcttttactgtattcactcacttaagtcttaaaacctccggatgtcctaattaccattatttccatttaacaaatgaagaaactaaggcactgaggagttaaattgcttgccctgtgccacacaattagtaaagaaaggagttaggatgaaaacccaggcaatctggttctgcaactcatgttccacatcagcacttctgcatgttaagtgtgaagaccagggcatcatgataaattgctgatcctggttcactggatctggggtagggcctgggactcagcatctctaataagcccccaagtgatgggatactgctggtccttggagcacagtttaacaagcatctccacaacacacacgcactacctctgtaacaaagctgtaattttctggtaacctttagcaaggatgggcccttcattcatctttctgacctccatagcaggttacctgaatgagtgagcacaggatataagacctttaccttaaatagtaacatcttttgattgaatttttagttgaatgtcaagaacttcccccctttaatcactggatgttgtcagaacttattcttcagaaagttaggtttatctttgtgggttctatttgattgatttgtgcattggctggccaaaatacatatccctcaacttggaagttacgaaagctgtattcatttgccaagcattcatttccatacttgggaaagttgtcctctaagacagagtacctgaaactacaaatcttacccagccctcaaggccaaaattgttcacaagaattcccaacatcgtctgtttcatcctgcaagtggaagtgtgtgagtggtcttcgtgtaatattgatgttgaaaaggaaaagttgtttggtaatactaaaagtttatttattccaaagggcctactttttgtattgtctgactcacatgttcttgtgagtgagctgaaattcatcaaaaattgtttgcaaatattagctgggtgtgctaacacatgcctgtagtcccagcttctcgggagcctgaggcaggagaatcgcctgagtctagaaggcagaggctgcaatgaactgtgaatgcactactgcaccctagcctgggcaacagagaccatgtctcttaaaaataaataaaataaaataaaataattggtaaatatttcctaattcagtgtatggccccaatttgattattttaataatgatatgaattccaccaataaaataatgtgacatcaaaaaaatccaaggtagtgcttttataaggttacaatgttttgcccaaggccttggataccatttaattattcaaaacagaaacttgatatttcattcacaatataagaacttgacactaaaatcaaagatgaggtttacagcttattttggattctctttaaataaaattcttcctccttcaaatcttcctcctcaaataataaatttgcaagatattaatttatagaaacaatagtttatcaaaatccctgaactttaaagcatccaatacagtaaaaagaaaaggttttcctttaaatagtgatgctatctctttcatttctatactgtacagatttggcattcacaatgcactttcattggatgccttggataaaactgggtcctaactaggaaaaccatagtaatccccatttttagagaagggaacaattgctcattatggtagagtgatttggtgcctaatatcaacggccaatgagttgaagaactagggtctttttaaatatgtatcaagaaaagaccattcattcacttgaattgaaactggtcaatgattggttcaattcagctgcttttacgaatatcctccataaaaatttctaaaatttcaatggattctaatgaggggctttgggttcatctgcctaaaatagggatgagtacaataacttcaatatccatgtcatgtccaattataaaatcatggctcccaattaatgatgaagtttttcactttgctttagagcagggcttctcaagttttaatgtgcatacaggtgcaggaaatggggaggtgcgggtcaaatgatacaaagcaggaaatgtgtaggatgaacaagtaaaaaaatctaatgtacagcatgaggactataagtaacaatcatgtatcatagtcagaattttttctaaatgagtagattatagctgttcttgccacagggggacaaagcgggtaactatgtgagatgatggatatgtctatttgttcccttatagtaaccattttactgtacataggtatcttataacatcatgttgtatgccttgaatttacacaataaaatttatttttttcaacgtgcatacagatcacttgagaatcttgttacaatgcagattcagattcagtaggtctggcacagatcacaaaacaccgcatattcaacaagcttccaggtgatgcttatggcccatggaccatatttggattagcagggctctcaaactttagcatgtaccagaatcacccagatggcttcctaaaacacagatcgatgggtgtcgtagccaaagtttctgattcagtaggtctggggcggactcaagaatttgcatctctaacaatctgcagtgaagctgatgctggtctggggaccacacattaaaaaccgctgctttgaagccctgcatctttctttcgcaagagtgtggctctccccagatgaaacccattaattccatccactctaaaatgacagcttaatcacagaaacctgggaagggctccaggagacacttttcctgggaattatccagaatttgtcccgcaagtgattgaccatagtccgtaccaaacgatttgacttaattaatctcaaagatatatttccacaaaattaacattaagagttgttggtctactttcctttaaaaagagaaatccatgatttctacctagcagccaagagttcattccttctgaattctttgtaaactgtatcaaaacacttctaataaattcaagttggtaggaacttttttatatacatatattaaagtttatatatgtaacacatataaaagggtcagcagagctatgttcttttaccctttgatagcctgctgagtaacctgctgttattatgcattaaatacaaacttgttacagacagcagaaagcagcatcttcactcttttcattcattgatttattcattcattcaaatttgttttattttagcataacatttaggtagttctttactttcaggactttgccattaataatagagctatttattatgtactaacaggaaactaaatatgaattatgcattcattcaatattttttttttaaaaaaacccaactatgtgtcagtcactctgatggccattatatatgtaatgctgaggaaaatcagatgctctcatagcccttacaacttggaggaagagagtgacattataaaatttatacatctatgtgtaaaattgcagctgctactaatgttcaacaaaatgataccatgtgaatgctgttgactcatgtgagtgcttatatgatgacacacagccatgctgtgtcaagattcacttgaacccatgctccagttaccgctggaagaacttgctggacattaactgtgcaaaacaccaaaagtactttacttggtgttaatgaagaagctcaaaaaactgaagtcaacagatgaatttatccagctcattaaagctgtctcttgcttctaactcaccctggtagactcttcaaaattaggagttttgacatatttcattatgaaaaattctaagctaacattgaaagagctgtacaaggaacacctatatatcagccacccggattccataattaaaattttgatgctttcacttgatcacatataaatccctctatccatttatctatccatcttggttcaataggatgcattttaaagtaggttgcaaacatcagtatacttcactcctaaacgtttgggagtgcatacagcaggacaaagtttgttaaagtgattctgaatttcttagaaatatgaggcagatacattatctaatttcattcaactaatagaaatttaaggtacaaattgtgctcatgtttgaagaagctcctccttaagggaaaggctggctctaacaaagctactttctgacaatatttgtcctgagtagggtggatttctgcatgatgaaattatgagactcacccgtaatacgctggaaaaactgatggccttacctcttacccatgtggtgcccatccaaagcaagatgctgtcataaggtaaaaagaactgcactcttttttttttttttttttttgagacggagtcttgctcagttgcccaggctggagtgcagaggcgcgatctcggctcactgcaagctccgcctcccgggttcacgccattctcctgggtcagcctcctgagtagctgggactacaggcgcccaccaccaagcccggctaatttttttttttttttgtagttttagtagagacgggatttcaccatgttagccaggatggtctcgatctcctgacctcgggatccacccgcctcggcctcccaaagtgctgggattacaggcatgagccaccgcgcccggccggaactgcactcttcagatgactcagacaaggaaagcatgatccaacacctctaatagcccagtaatacatatgatatttgaaaggcccttcacttaccatgttaaccattcagttaaatcctccaaatcctaattctctgctgctcaaccatcagatccaaactttcaatgcccaggacggaaatcttttcaaccagcacatcaaatggcttttcctccttctatagaacttataaaaatgatcttttcagttaccattttactggtccatctgtattctattttcagtgcacttctgttcattttggaattaggaagcgtacaaattctttttatatttaattttaacattcaagttaggcatattttgaagaaaaagatattgcaatgattgcatttgtccactagagggcaggaacttacttctgtggttcattctgcactttttttttcactacccacctaagaaaaatctagtcaatgcgactgaagtactaccaccttctgaatcttctttccttgataattgcttaattggaatttaaatctttgaatcaaattaagaaactagacattcctagtttctgtttctatcacaatttccagtaccagatttttattcactcataaaaacaaataatgggggagaaataaaatattgacttctgctgattctcttgagtgggataaggaatttggtttttgcactttggcttacagatccatatagtggaattattcgatctttcaattataatatcagaaagttcaattttagtattgtactcctataggtgctttttttcatttttcagccattgttttgcttaacttatttaactttgtatgtacggatgcctttttagtgcaacagggtagttctttgagaattatgtttacatgtagacatctctatctcagcagcaagttaagttattattacggttccttaagctgctgttatcatagagtggactgctgtaatagaaaaatttagtctttagcatatagtccatattcaaatacttgttcacagtttcctgtgtgacctctggcaagttacatgacttttaataaagtttttagtaaagacttttaataacacctccgattattttgctttattatggtactgtgcgtgttgcctacactgactggctgtgaaaaagctgttgtatataacagtgtctaacccaggatgatctacagccacttctaattgcagtctccattcggtaaatggaatcaattaaaatgtgtacctatgggctgggcagggtggctcatgcctgtaatccagcactttgggagaccgaggcaggtggatcacttgaggtcaggagttcgagaccagcctggctaacatggtgaaaccccgtctctactaaaaatacaaaaattagctgggcatggtggtgcatgcctgtaattccagctactcgggaggctgaggcaggagaatcgcttgaacccaggaggtggaggttgcaatgagccaaaattgcactactgcactccagcctgggtgacagagtgagactccatctcaaaaaaaaaaaaaaaagtgtctacagcccttagcaaaaaagtttaaacattagtcacatgtatatgttatagaatcttacttaactcaggcatcccaaccagtactggtctgtagcttattaggacctggcccgcacagcaggaagtaagcagcaggtgggcaagcaagcaaagcttcatccccatcactcaaattactccctgagctctgcctcctgttagatcagtagtggcattagattcccataggactgtgaaccctattgtgaactgcacatgtgaaaaatctaggttgtgggctccttatgaaaatctaatgcatgatgacctgttactgtttcccatcacccccaaatgggaccatctagttgcaagaaaacaagctcagggctctcactgattctacattatggtgagttgtataattatttcattatatagtacaatgtaacaataataatagaaataaagtgcacaatacatgtaatgcacttgagtcatactgaaaccatcccctcaataacctcctctccccctggtccatgaaaaaattatcttccatgaaactggtccttggtgccagaaaggctggggaccactgacttaacttgtatataacatctgtctccagaaaatcatgaggtccctgacaagagtcagactatgcaaggatctccaaattccttagcccagtgtttaatgtcctcattactgaccctcttctctatgcctttgcttggccactggggcgagaaggtaagaagctcctggcccaccgagttcccagcacagtcctgtcacttcagcattactaaggatgcatggctcactcttgcaccatctcagaattccaggcaaactctgctcctcctggcagagggtacagattggcaacttctgggccaaatgcagtctgaagatgtgctctgtttgtcttttcagtgattggaaactgggagagttcactcaaaactttcatttttccatttttctcaaaacctgggtggaaataggctaaaaatgaacagcagccactgccccatttacaggctgtctctctcctgctctggacatgacctcactttgccctattgcattaaatctacttcactggtttctatcatttccactaactgcctattactctacagtgtgaatagtatccttaggggttgtgtcccaagagtgacacagtccactctacatggagacatcaccaggtgtgacccctggactaagcatttctctaaagcctacttcaaagtccagcaccaacccttggtgcccactttatccccgactgcaaccataaagtatttgcctgaatgtttacttaacatctatctgctttttaaaaatgtctttgattttatatagtacgtccctttttggaaggtggaggctttgtctcacatgcccttgataagcagagatttattttttcctttatttgactcaaattgacaatcgaacttggtttcccaagggcatacagctacatggagtatctgaaaacctaatgcaaatctaaaaataaacttgttggatccagtttgaatgcacctccagtctaacacctcaagacactaattttagttgccaaaaaaaaaaaaaaagccaccattattactttcacagaagctggttttccctaacttccattctttcctccatcaaaattttctttttctctatcctttttcagagggctaattttagtgagctgtcacattgggaagaatctggttcattccccacatggttttagaaaccaacttggatataatggggaaggtcagatccccacggaatagggacatcttcctacctgctttctaaagcagctgagtttggtaaccatgggcaccctcttcagctgggaggccaggaaagcgttacccctgctgtatttaagccaaagaaccacccactgtgggtgtataggtcccatgtagtcaaatctagtttttcaagggaagtaagaaacccattgtttcagtataagatcaccttaattaaaagatttgacaacactggttgagccaaagaaaatgcatccatgtactccattgggaccatgactttccagtttgcaatgtcttgctgaacaacacatacacaatcctttccctttgcatataattctagggagaatttttctgatggatgtaactaaatagtgtgaccatactggcacttacccatcagaagtagtcatttttcaaaagaaagattctgccatagtgagctatacaggctgccccggttacttgtttagtctcctgtctcccctaactgatgtccagccactgctactaagggctcttccagcattgagtagggtgtagtaaacaagcagggatgatttgttgaattaaaataagttctgccatcacttaatgcagttttggaagatggtttaaagatgatttgggaaacagattaaaagccactggtgacaatcagtgtcactattttcactcttatcttactttttataagaaagttattataggtcaatttttcatctgtaatcacatgccaaaatgtcacaatgttaggctccaaaagacttctggaaaaatatatttcctaatgtatttttaaaatgtgctacaaagtagaacattgggatagcctcattgtcagtaaaacctgccagggacttggaaggcaattctgataaagagttacagagaatttagcatattgaaaagcaacattaaaagagtatgtaggcaattattttataaggatcagcatttattcaacaaacatttttaaactgtttactgtgtataaggtatgtggaattagctgctggagggtgtcgaatgaagattttacgtttcaatgcatttattattattattcattggtagtattccacaagcttaaaggttttatttgttttatgtcaacataaataacaaacagatgctctctaaaagaaaatggtattatttaagaatagggcatactaaattatgtgcttagtcagggagggaaggaagacaaaggtttgtaaaggataaatgaggagggttacataattgttttcagatgattagccttggctacaaggatcaataacaagagtgacctcagtctgacgttggacagggagttgctaggcaggtgtcctcacagaagtattttttgtgtaaagttgctatggcctttgtacaaggtgatggcttttgcagagtcttttgtgagagtttttcttatcaggcatttatgagtgagaaccttctctttatgacattccctggctctttttgtcagggttttttgggtttttgtgggtgttgttgttgttttaatataagggactccatttagattctgacaactttcacattatttaacatccacatatttactctgtgccagaaacaattctaagtactttataagtattaacttatttaatcatctaaacaatctaacaagataatattatgatccccagtaaacacctgtcttcatctataaggataaagaaattgaagcacagagagttaagtgaactgcccaaaatcacactgctggtaaattgcagggccagaatctgaacccaggcaagctgtgctccaaaatgtgtgttcttatccatcacatcgattagctcattctgtaaaacaaccccaaacttggcagcttataacatcaactagttattatttttcatgcattatctggtcagctgggcaggtctgcagatccagaccagactcatagactcagctcatctcagccgggttcactcaagtgtatgtgctcagctggggactggctggtccaggacatccttgaccaggatgactcagctctcttccagaagagctggatgacagaccaggatgactcagacctctcatcctccattgctataataggaccctgagaaacagtggaaaaatttgcaagggtcttttgtatcaagtttgctattctctgattaaccaaagcaaatcacatggtctggtccagagtcagtgtggaagggcaccaccaacgggcatagacataggttggtgtaaaaattggagactttaatacaattaacctcccatagtcatggctcaacactatgctgttttaaccctgctttccagggagtatcaaatttgatatttccaactccaaaagaattgtgaagatgctataaaatgtagccttgttggtttaggaaggcaagaaaagaataaaaagaaatgtggaaaatgaaaggatatttataattttaggctgatcctggagaaacaccatcagaggctccaagtgaagcgagaacgactccagcagaaaatggggtgaatcacactacaaccctgacacccaagccaccctcccaggctctccacagccagccagctccaggtaagccatctggaaagagctggacaacatgagcaagatcctccagttcattagtgccactgacggaggcgctgtgatgtgggtagctaaagcatcaagtggggaaagatgtgtggacttaggaggagctccgtcaatgtgcaattaatgaatgaaagccagaagagagtcatatgtgctcatctggctctacagataacttatgaaaccacaacaaaaaaaatcacccagatttccggtgtcctttttcagtgatgagttatgacccatctgctggcacagtttgagaagaattctccaagcagcttataaacaaccatgccttagaagtgcattcttagtcttgcttcattaattctgtgccaagggctcctttccctctttctccaactttcttttcaacatctttgagtgtctgccctgtgctggacacattgctaagcttttcatatggatcatttcaattccccccataccaggcccaagagtagattctattattgtccccattgtgcagatgaataagctgccattttcaggtgataaagtacttattgaaggccacagtgccagggaagagtgaccttaggcctgatgcagttcccaatgatactaacattcttgcttttagctcctatattacagccaaagccacactcttgtctcatttctcaaaatgaataaatgaataaataaataaataaataaataaaataaaaatcctttgatttctacgcagctaactttgacatttaatcttatgcagctttgtgtaactattccttgtgtgtatgtcctgtttaccccagtagatgggaggcttcctaggtagacttcaatttgatgcctcctctgtacatcacacagtgctggggaatagcatgtacctgataatttcttgttgaattggttaataaagtaaacaaaagggagcagaatttccttccatgaaggtgtggaaaggagctcctttctttgtcatactagatcagggtgccagtagatccagatcttttaagggtatttctcatgggagagaaagagaattaaaaaaaaaaaaaccaattatatttaatttgtatcagacacgcttgaactgctttttaaaaggttgctggccaggcatggtggctcatgcccgtaatcccagtactttggaaggttgaggcaggtggatcacttgaggtcagcagttcaggaccaacctggccaacatggtgaaacccccatcgctactaaaaatacataagttagcctggcatggtagtgcatgcctgtagttccagcaactcaggaggctgaggcaggagaattgcttgaacccaggaggcggaggtgcagtaagctgagatcgcaccactgcactccagcctgagtgacagagcgaggctccatctcaaaaagaaaaaaaaaaagttgccaaagtcaataatagtaagaagatgacgttataaacaagaagtaaattttcaaataaagagttttatataccaaatacaaacatcttgaatgcttctgaaatataaatccatcatttaaatgtgtgagtaaatagtcatgtgttcctgaaagtaaaagagaatttagcattttcacatttaatttttttaacttgatattttggaataattgaacttacagaaaatattttttaaatggcacagaatacattgcaaaaataacctcttcttcccctaaagttaacatctcacgggatcatggggcaatcatcaaaaccaggaaagtaacattggcatgatactctgacctaaactgcacaatttatttggactaacctgctttctacagtaatgtccttttactgttcaagattccaacgcaggatcccaaattgtattttattgtcatgattctttagtctcctttaatctatggcagtcccacagtctttcctgtctttcataaccttggtactttggaagaactctggtcagttattttgttgaacatccctcagtctgggttggtccgatgtttccccatgattaggttgagggcatgcattttgacaagagcaccatgcaagtgatactcgcctttctcagtgcatcacatcatggatatatgatgttgctgggtctcatcactgatgatatgggatcacttggttaaggtggtttctccactgaaagttattattttcccctcttagatatattgggagagctactttgagactatgcaaatatcctgttcttccttaaacttttgcttactgatttttaacattcaccaatggatctttcctgtaacagttattactgcctagtggtcaacatttgacttttatttttattttactttattttattttgagacagagtttggctcttgttgcccaggctggagtgcaatggtgtgatctcagctcactgcaacctctgcctcctgggttcaagcgattctcctgcctcagcctcccaagtagctgggattacaggcgtgcaccatcacacccggctaattttatatttttagtagagacggggtttcgccatgttggtcaggctggtgtcgagctcctgacctcagctgatccatctaccttggcctcccagcgtttgacttttaaaaggtcacttgtcattcctgatttagccagaagatggcgatagcattgcctaaactgaatttgttccaagtggatgtcttttctcttttctctcgttataaatggggcatataatatcacatttttttttttttttttttttttggagacagactttcactcaatctgtcacatagggtggagtgcagtggcatgatctcagtccactgcaaactccacctcctggcttcaagtgattcttctgcttcagccaaccaggtagctgggattacaagtacccgccaccatgctccgctaatttttgtatttttagtagagacagggtttcaccatattgccaggctggtcttgaactcctgacctcaagtgatccgcctgcctcggcctcccaaagtgccgggattacaggaatgagccactgcacctggcctaatgttacatttaattaggtttgtctcaaagctgcaaatgaagactttttaagaataatttttataaagaattttctcacacaatttgtcatttctctgaaaagagatttagattcaaggcccaaatatgtttgtttgtttacaggaagaataaaatttaaaaagttgaagaggctatttattttatcttttatattacaggttctgtaaaggcacctgccaaaacagaagatcttattcagagtgtcttaacaggtaaatgccaccctttccccccatggaattaagcagctcagtgttacacagtggaagtatttagaggagaggaaatttccattcatatctgaaaaacaacatcattaatatttcttcttctaaaaaatctagagacatatacttttagtttagtctacatgatatgatataatcacagagaagtaaccatactttgtagctagaaccctactggcataaaaataatgtagtttcacaagatagctatttcagcatcaaagaatagtttcatgctggaaatgtaacccagtgaacaagaatgcctgtcttcccaaattgccaataataaactatattttagatatgcagaatatgatccatttgtgagcataaaatgcacagtgtttaagaactgtgatacagtttggagttattttatatttggttagtcacataaactagtggaactaaaattggtacaagctttgtgcagtacaattagcagtatgtagtggaatcttaaaaatgtttataatacttggttcaatatacaacagaaatgtacacacacgttcaccaaaagcagcaccactggtaagggccaaatctagaaacaacccaatgtccatcagctgtaaggtaggtaaataaattgtgataaattcctagcatggaacaggaggcaactgcaggaataaataaactcaagtcacacacaacatggataaaactcaagcataatgttgaggaaaaaagtcagacacaaaagaacatattctgtaggattccatatacaccaacttcaaagacaaaactaatctgtgctgtagaaacctggatttggattatacttggtgggagacaggaaccaaaaaggaaggcttctgggatgctggccaaattctaactttgacctaagtgatggatattgaagcacattgactttgggaaaatttacaaggctatacttttatgatttatgcactttgatgcgtatatttgcatttcatcaagaaatgcataaaatatgcgtagaaaaattacttgaggaaagtattaaaagaaaacaaaacatggtttggttttgttttgtttttgagacaaagtctcactctgccacccaggctggaacacagtggtacaatctcggctgaccgcaacctccacctcccgggttcaagcaattctcctgcctcagcctcccaaatagctaggattacaagcacgtgccaccacacccggctaattttgtatttttagtagagacggtgattctccacgttggccaggctggtctcgaactcctgacctcaggtgatccacccgctatttttagtagagacggtgattcgccacgttggccaggctggtctcgaactcctgacctcaggtgatccacccgcctcggcctcccaaagttttgggattacaggcgtgagccactgtgcccctcccaacaaaacatgtttttaaaagatttagttctaggctgggtgtggtggctcacgcctgtaatcccagtacctggggaggccaaggggggggcggatcacctgaggtcgggagttcgagaccagcctgaccaacatggagaaaccccatctctactaaatattacaaaattaaccgctgtggtggcgcgcacctataatcccagctactcaggaagctgaggcaggaaattcgcttgaacccaggaggcggaggttgccgtgagccaaggttgcgccattgcactccagcctgggcaacaagcgcgaaactctgtctcaaaaaaagaaagatttagtttcatgggaaacaacaccatattaatgcatacaacaagagacagcagtgttcctagaatgttgtttaaaataacgtaaatgaatggacaaaaggcaatggtctgtaccaatacattagctgtgattatatcttggtggcttatttataaatgatatttgtgtctttatataagtgagcattacctttatacttaagagcatagtctaaggaacagcctctctcatctacagactttttaaaaataatagtttatgtggatttatttctaatcgtaggttagaacatctagagccttatttccaaactgcctatagctgatatgctgtaaaccacttttaaagaaatagaattgcatctgcctccaagaatgcagcaattccttgggattataaattcttaatgtaataatttattatgcaaccataatgagtcaatttgggcctgaaggaaaccattaaataaatgtacctggttttctccatggcctcattctcaaaagagatcgaatgtcaggagaatagacacagtataagaaaaggaaacatatttctattgcttaaagaccttaacatttaataacataacttattattctagtctcaatgtttattcactagacatcttattttctattcaggtctcttgttattcacagcatatattatttctgaatctcttgatagtttcaaatatttatggtaacattttttgttcccagaagcaggacattcaattcaaaccatggaaacatgtgaactatgacttgatctaggtccatataaatgataattcactggagttaagataccatcagttgtaaagcatcctacgttcatgtattgctaaaaaagaaaagcactgaccaaccatcataccccaccaaccataagatgcatcttgatttcggaaatgttaacatattttttaaatgcacattctagaattgattgaatatatcagtaaaatacagattagttttgttttgttttgagacggagtctcaccctgtcgcccaggctgcagagcaatgatgtgatcgcggctcattgaaacctccgtctcccgggttcaagtgattctcctgcctcagcctcccgagtggctgggattacaggtgcctgccaccacacctggctaatttttgcatttttatttatttatttatttatttagagacaagagtctaactctgccacccaggctggagtgcagtggcacaatcttggctcactgcaacctctgcttcccaggttcaagcaattctcctgcctcagcctctcgagcagctgggattataggcatgtgccaccatgcccagctaatttttgtgtttttagtagagacaggagttttgccatgttggccaggctggtctcgaactcctgacctcagatatccacccaccttggcctcccaaagtgctggacttacaggcatgcgccaccacacctggcctaatttttgtatttttagtagagatggggtttcaccatgttggccaggctagtctcgaattcctgacctcaggtgatcctgcctcggcctcccaaagtgctgggattacaggcatgagccaatgcacttggcccagaatgttttaaggtcagactctatcacattcaaagttttctcagcatgggataaaaaaatcagccaggcatggtgactcatgcctggaaatcccagcactttgggaagccgaggagggcagatcacttgaggctgggagtttgagaccaggctggccaacatggcgaaaccccgtctccataaaaaatagaaaataattatccgggcatgttggtgcatgcttgtaatcccagctacttgggaggctgagacatgagaatcacttgaacccgcgaggtggaggttgcagtgagctgagatcacgccactgcactccagcctgcgcaacagagcaagactctgtctcaaaaaagaaaataataatcataatcataataatatagtaaagtgggctgctagtaagcctctggtgactttgtgcaaattatattaaggtatcttccctcaagacactttactgctatatgcttttatgataaatgtaccagcttatgatgtttatactgtaaatgataccttttagaaatggtgttgtagaacctgcacagttattttctaagcctccacaggcacagtgccagaaactgagttaaatactttccatgagttcttttatttcatcatcttaacaaccctataaagttatagaagtattataatccttatagcaatgctgttggtgccctgcccagattccttgtacagctggtgcacccgtctcctggctggtggtgagggttggctgttaacagctcataacttctccttctctgcaaaattgccctcaaccaaaaggaagccccctctccagatggttatgcctccctgcactgaatgttccaaatatgcaagaagcttgccttcttgcctcaagatgagaccagctcagtggtacaactcacactccagcacttccccatgggatcaggcagagaccagactccatccttctgagaccacacccttgctcagctccttccccagccccgtctgctttcctggctcccctactctgagagtccctcagtaaatcacgtgcacctgaatccccatcttgcattctgcttctagggaacccaaactaaaaatatatgtattcgaatgaagcaattgggtctctgagaagtttagtaacatagtctcaaagttagcaagtgatagagccagactggaacccaggtagagctgacatcaagctttgctcttaaactctagctgggcaagatcaaccatttcttcctaagaaggtagccgctcttctttccatctggatgttcagccctcccattcccttagctttcatattcatttgttgcagaagtggaagcacagaccatcgaagaactaaagcaacagaaatcgtttgtgaaacttcaaaagaaacactacaaagaaatgaaagacctggttaagagacaccacaagaaaaccactgaccttatcaaagaacacactaccaagtataatgaaattcagaatgactacttgagaaggagagccgctttggaaaagtccgccaaaaaggacagtaagaaaaagtaagttcaatgaatatttttagttggtttcatagcatgaagagttgttaacatggatttttaatgttttatatcatatttttggacctgtaccatggcaagaaaaccacctaacctccgttctccatagcttttgtggcaccttagcccagatttgcttgtgaattgaatttttttatttaaccaaattctgagaataaatatgcaggaagtcctcctgtgagtctagcctgcgatcccaattccagttaactaacttcctatattacagctgccaatctcatgggtatgagactttgcctggagtacctagaacctagttggagaggcagctgatttttttttttgagacagagtcttgccctgtcacccagactggagtgcagtgacatcatctcggctcactgcaacttctgtctccagagtttaagtgattcttgtgcctcagcctcccaagaagctgggattacgccactacgcctggcgaatttttgtatttttagtagagatggggtttcaccaggttgcccagctggtcttgaactcctggcctcaagcgatctgcctgcctcggcctcccaaagtgctgggattacaggcatgagccaccatgcctgcccacaactggtcttatagaaaagagaagcttactatcctttgctaccctgtctgaaatccataatgccctacacaggtgactctaatttgggcctgggttcccacagccccatatacccaaaccttgatgatgagaagcatctctcacacattcacttaattaatattttttgagtgcctactgtgccctggggacacagcaataaacatgacctacccaatcatctcaaatagtaacatggtaatgtgggaaacataaataataaacaacaaacacacagcatcatctcaggctgtgatgaggactatcaaggaaagaaagaaacaggaccatggggtagagaatgactggagataggagatcccttctgacatgttgatctgcaataaggtggcacagaaagaataaagcctggtcagctatggaaagaactagggagacttactccaggctgaggaaacagcaagtgcaaaggccctcaggcaggaaaaaaatgtgcttgtgccaggaacagtaaagctggcaaagtgggtgaaacattgtaaaccatgagaggagtgaaacaggatgagatcagagaaacaggagggaatcccactgctaggttctttagagctggagcaagcaacagttcaaaatgtatcgaacgtgcaataagattctactgaagaaagaaattgatatggcgaaatttgagagtctcagagcaatgactctagctgctgtgtggaagagggaccctcaagctgtgcatctcaaatggacatgagtcactggggatcttgttaggtgcaggttctgctccatgtctgaattggggcctgagcagcaccaggtgatgctgattctgcagttccatggacaacactctgagtagtgaagatcaaggactcagagtgaaagcaggagaccagttaggaaactttttcatgagtccagctgagtaatgatggtggtttggtctaggatgacgctggtagacatggagagaaggggatgaattcttgatttgttttaaaaagatcgtaaaatatggggtcagaggcctggaagagagaagcctgcttgtatgtctctgcaattcccaggtgtcctttagagaatgaaactcatgctgttacccacaccaaatgtgttcatgaaactccattatctagcctagatcagtgcatctcaaatttcagtgtgcatgtgaatcacttgcagcatttgctaaacacagaccctcgggacctgaccctagagtttctgcctcaggggcctccttcggtagggactgagcttctgagcttctaacgagctcctaaggtttgctgatgctgctggtccacagactttccactgatgggccctggtctataatcattcaggagcatcctagaaattgaagggtggctgaaaggctttctttggtctaatccctgcctcccttcccagctgccatctcccagcacttcatatgaaaacctgtactttctgccgagttcccaccatgatgagatagggcagttaggattctctgggctcagggcccttcttcaattgcaagactcttgtgtgaacaatgcagacgctgcctctaaactccaacaaagacctgcttccaaatgtgaggttgccgtgtggatttcagagtgtcacccgctctcagaaccccacatgtggactgcgcatcatagcttatcatgggactttgtggacacagggtctggcggaccacagggggcttcctctcttgaaccctgtcgagggctgttcccagttctggaatagcatttcattgagtgtcaacaaagtactgggcatatgtgtcatatcagtttcctaggattgctgtaaaaagtacagcaaactggatggcttaaaacaataaaaatgtattttctcacagttttggaggctaggaattcaaaatcaaggtgttggctgggcgcaatggctcactcctgtaatcccagcactttgggaggctaaggtgggaggatcacttgagaccagcctgggcaacatggtgaaaccccatctctactaaaaatatgaaaattagccaggcatggtggcacacacctgtaatcccagctacttgggaggctgaggtaggaggattgcttgaaccaggagatggaggttgcagtgagccgagatggtgccactgcactccagcctgggcaacagagaaggactctgtctcaagacaaaacaaaacaaaacaaaaaaacaaaatcaaggtgttagtggactatgcgctctctgaaaagtctaggggaagaaacttttttttttgtttcttctaacttctggtggttgctggcaatctttggcattccttggctgacagacatatcactccagtctctacctccattatcacatgaattctccctgcgtaggtgtgtcttggtccaaatttccctcttctaatgacagacaccaggcattagattcaggtccaccctaatccaccatgacctcattctattacatttgcaacaacctctttccaaattagatcacaggctgaggttctgggcagaacctgaagtttaccgggatgttatttaacccagtacatgtgctaatcacttctatgtactattccatatatttctcacagcagcactgtgaagtaagtacaggcatcacccacattggataagagaggacctaaaactcattgaggccaagtaacctggccaggggcacatgcaacacacaaggccatagtgacagtgaggtcatggcgtggtgccccctgagatactacttgtgtcagatgacatagcagatctggaatctgcatctctgtagacctgtgactgcttctggtccgtatacttataatcttctatctctatacaacaaaacaaacagatgcatgaaataaatatgcccaaataaattccctcgttaactatccctaatgttaggagatttctcttctaaatttagattcctgaaatttctttgaatatcttttgcaggtatatagtatgaacttcttgacaataaataatgttttgcaacatgaagttctctaatcaacagcattaatttttacataaaaatcttttcttcaaagttgaataattagggaaatggaaataaatgcagtggatttaaattttgttgctatcttttgaggtcacagacagttcttgtcttcctcagggcttatttagctgtcaagaatatttttaatttcagatatttagtgagcattaacagagcgttgtgtaagacattgctcttaagtatctttaaacatcaactcataacatttttaaaataaaaattaacattttatttttaaaataaaatgttatttgtggttttaaaaaaaagtgtatcgtttagaagacataactttcaaaagcaaaagtatcccttagttctatttctatatatatatatagcattttaatgaattgtagcatcaagagaagtgaaaaaaagccttttaagtttaaattattgctccacttaattttctatactatagtatataaattactcttatcagatagcctatttttcatatgttggctaaccaatggacaacgtattgccaaagataatccaacgaccttcacagctctaggaaatcttatgtagaattggttgtacatttactgaaaacttttttggaatcattgtcatcagctgtctcagtaaagattatctcaaaagcttgactgataataattgccactgagaaataaaatttcattctttaactgaaaactttattaattaccctgaaactatgtaagtatgtaagtgacctgtcaatgagcaaagtataagacatattacatccttcctttactgaataatcttcttttgatgccaagttatagagataagatgcattttttagatttatattgtgacatatgatttaacacatgcttaaattgaaagcactatcaaaacctaatacttgggctttaaaaagtaataaaatcatctcttttttttttgttttttgtttttgagatggagtctcactctgtcatccaggctggagtgcagtggtgcgatctcggctcactgcaagctccgcctcccgggttcatgccattctcctgcctcagcctcctgagtagctgggactataggcgcccgccaccacgcccagctaattttttgtatttttagtagagacggggtttcactgtgttagccaggatggcctcgatctcctgacctcgtgatccgcccacctcggcctcccaaagtgctgggattacaggcgtgagccaccacgcccagccaaaatcatcatttcttaagcctggaggatccttaaaggccatctaggtgatatttgtcactttttcaaggaggaagctgaaagctaaaggtattaccatttacctgtagttacacagccagttcaagcaaagcttggcctaaaacttctcctgaatttctgctttagtcttatgtactatgaaccccaaaaatctgagacagttaatttagcaagtttatttagtaagttcatttttccaaggttcaggacgtgcgcctgtgacagcctcaggaggtccagatgacatgtgcccaaggtgttcagagcagtttgtttttatacattctagggagacatgagacatcactcaacctatgcaagatgaacactggttctatctggaaaggcgggacaactcgaagcaaaggcaggaagatgggaagccgggagggggtttccaggtcataggtagataagagacaaatggttgcattcttctgagtttctgattagcctcttggaaggagacaatcagatatgcatttatctcagtgagcagaggcatgactttgaatagaatgggaggcaggttggccctaaaccattcccatcttgacttttccctttagcttagtgatttggggccccaagatttattttcctttcactgtacatatttgtttattcatttttgtatttacttgtaagtcatatcctgcaaacttccagtagaatattgaaggtaacatcatagaagatttgtatgtaaaaatcccatgaaaatagaaagagaaacaacacacatgcgtagactaagctttggacaaattatctagacctgctgcccaatacaggagccactagctacctaccagtggctcttgagtccttgaaatattgctcgtgagatgtgttataactacaaaatacacaccagatatctaagacttcacttttttaaaaaagaatgtaaaatagctacaacatatctgttgattttaattacatgttgaaatgatattttggatatattaagttaaataaaatatattattaaaattaatttcactcacttatttttactttttaaagtgactactaatagtttgaaattacatatgtgaagggaatcacatatgtggttctcattctgtttctaccagacagcgccagccatttaatgtcatctctgtccttgaacactgaattcagctcttagcttctgagaaaaggagtatgggtttgataattctcctcatctgattaaaggaaacttgctgactcttccaagagagacaagcgttttcctagtattaaattgccagagatttaatttcatggatcttatacaagcagcagaggggataatgccttcaactttgtttttatagaagatgcagagacgttgttcacttgtttttttcttgtgttgtcctttaaaacaaaacaaaaccaaaaaatcccttagtacatagtatctaaagatacgtcatgaggagcttttcttcaagtggcaaagccagtgggtctgattatgtctacctgtcttccatctctcttgatatgcaataaaatcctgaaaacacctcagataaatgaatggatgggcattatgtacattgaatttgtttccttccttccttcgttccttccttccttcgttccttccttccttccttcctttcgacagggtcttgctcttttgctcaggctggagtgcagtggcatgatcacaactcactgcagtctcgacctcctgggctcaatcaatcctcctgccacagactcccgggtagctggaactagtcgcatgccactaggcccggttaattttttttttttttttttttttagaggtggggtctcactacccaggctgactttgaacttctgggttcaagtgatctgcccacctcggcccccaaaagtgctggaattacaggcgtgagccaccagcacaccaggcctgttcctaatactctgtctttccctgtttcctacagatgataatatagagtacaaaattggaatgaatcacaccaatttctttaatattcatcatctcaagtgagctttctacataatgtgaagaacaggttactcaaaaatagttttggtccagacatggcatgcagtcatgctgtgttgctcttaagagcacaggtgttgcccttctgcccctgtaatttttgaccttgggcaagttgcactactgcacctccatgctgtgtccttggccaattatctcacagagccgtggtttcctcaaatgtaagctggtgatgggtataccgacttactcggatacgagtgtgcccggcatatggggggatggttggcaatgagagctacctctgctagagtggttggaactgattgaagaaatgcctttatgccctggttacaatgatttcctgctatataagatcattcaggccgggcgcggtggctcatgcctgtaatcccagcactttgggaggccgaggtgggcggatcacctgaggttgggagtttgagaccagcctgaccaacatggagaaaccctgtctctactaaaaataaaaaaattagccgggcatggtggtgcatgcctgtaatcccagctacggaggctgaggtaggagaatcacttgaacctggaaggcggaagttgtggtgagctaagatcatgccattgcactctagcctgggctacaagagcaaaactccatctcaaaaaaagaaagaaaagaaaagaaaaaagataattcaatgttaactatgtcatgccaagaggaaagtttccctcaacactgcagtgaggagccttatagaatgtccgtcctcatttggcattgcacataaaaatgcaaaaagaaacttgagaaaattccgcatcccttatttgacaaaatctgattctaacaccagcttcaaccaactcccttccccatgtgatgccactgatgctggcccaattcaaagaaaaagcaaccagaattactgacagctgattctaagaaactttacctggcctatcggaccacaagtgaaaaatatggaggcagagtctgatgtgttgaatgtcttaggtagtctttcgggaagggattccatataaatgaaaagagcatacctactctttgtaccctgttcccaatactctgtctttctttccactgtttcctacaggtgataatacagagtacaaaattggaaggactcacaccataagttaatgataattgctttaatttattttgacattcaccctaaccttctaaatatttgtataattctctaagaacaatgcagagaaagtcatactgctaagaggaagcattcgaaatattttagaatgaactaacgcatctctttccccttgtaagctttgtgtggaaagtgccatttgggtaaagatatcagtgaagttggtgaagcctccaaagggccttattttcattgtgtgtctttgctgttaaaaatcttgttaagaggccgggcacggtggctcacgtctgtaatcccagcactctgggaggctgagatgggcagatcacttgaggtcaagagtttgagaccatgctagccaacatggtgaaacctcatctctaataaaaatacaaaaattagccaggtatggtggcacatgcttgtagttccagctactcaggaggctgaggcaggagaatcactcaaacgtgggaggtggaggttgcagtgagctgagatcatgccactgcactccagcttgggcaacagagcaagactctgtctcaacaacaacaataaaattgttaagaaacagaactcagatgtcagccaggagggttatctgcacacggcatctacacgtgctctctgtttataatcatcacccctgatgctaaacaaggcacatctttagcttcctctaacaaagtctactcaatgcagtgtcctctgaagttttcatacgggaaaggtaactgggaatgccattacacttgtcacattttaaaataacaaaaaagattaaaacctgaaaattttttattagacactgtttttcccaaacggagattattattctcaccactgccatgcctagggcccccagcctctttgcttttctttctgcccctgcctctttctagagcaccatgaattccattcagtctctgggattggagacactctattgctaagcttgtccttggggtctcaccctctaccccaagtggcttatgaaaatatgtatttccaaacagagaactttctctaggaggaattctggtgaataaccttccctccaccttgttatggcctgtctgttttgtgagtcaaactctgtgtctttgcagatcggaacccagcagccctgatcatggttcatcaacgattgagcaagacctcgctgctctggatgctgaaatgacccaaaagttaatagacttgaaggacaaacaacagcagcagctgcttaatcttcggcaagaacagtattatagtgaaaaataccagaagcgagaacatattaaactggtgagcctgagaaacatgatttatgtttgtgcaactggaactcccttataggaaactttggatacttttggataactaaaaggagacaagggtgggtgtgactggcaccaacttgagagattgtttaggtgacacagtgtccatcacactattgtttttataagccccactgtcttaacatctttaccaagcttctctgtcttctgccaataaggctgtattttatcatttttattttcactaacttatgttgagtttataattgcttttgggaatctttgaaatctcataagcaaatagaaaacacttatctttgtttaagaaattaagaacatgttgcaaacaaattttccctttttttttttttttttttggtagcactgggctttgtaagaatttttttaaaattatacagtacactgtcctatatttagaaaagtcagtacctaaatggccaacacggaatgttggctacccaattcataaggctccctatgaaaggaaatgccatcctcaccattaataatcagttttattttccaaaatgttttctcacgaattgagacattctctccatttttgttgattccttgatacatagtagggacacaataaatatttgtgacagatagattagataaatttagcaacaaaatatccttgaaaacaagcttatgccaaaaccaaagaaataagtaagcttgatagaaattaaggtagtgtatccagaagaaatgggttttaagagatatttgtataagctgtctatttctttgctgagggtctgtgcatataagagaattctgagcagcttcagcttgtaaggttggaagcctatagatgatttagccatcactgtataataggtgattcagtgtaattctgttgttctaggacaacagtccccagtgactgtatgcaatgagtagatcaaaatcacatgaattgcttattgaaaatcaaattctaacgaggcccgttattctcaacttgagcatgaatcagaatcacctggagagcttgttagaagagatttttagggtctaccttaaattttcaacagatctctcgtagggctggtgttttcatatttctgatcccaggaccagacttcaagaactgctgcccaatacctaaatgtgaggctcaggatttactttttaacaagccccacatgatttcgaggggttgcctcatttgtgaactgctgaaataagacgaaagcagtgaaagaatggctgggcaggggttggatcaggcatagggagggattgccttgacagacctgagcaagtcaaagtaaattttaacgggcaataatggctttgagatccggctataaccactgccttctgactttctccagcaactcatccccagtagtccagaacataataaaaattaaaatagtggccgcatattaagcattcaccatggggctatattctgtgctgagtcatttacaggaaacagcctatttaattctcacaataaccattagagtttggtactattgtcagccccattttgcagataaaaaatgtatatagcaaaatttagtgactttcccaaggatccacaactggaaggtggtacatttgggatttgaaccttggtcctcgggttctagagcccctggtttataaccattgtgtagatgcctcggctaattcaggtttcaagccaatgtcatcataatgaagggagttgctctggtgtcctgctcacacagagagcacacagcaaacttcttcattatgatacctggaatgccatgcctgtctctctttaaacagctttatttcccaatcatacaattcactcattttaaagtgtgcagttcaatggtttttgtatattcatagatacgtacaaccaccactagaatcaattttagagcattttcatcgccttaaaaagaaatcctaataaattaggcattcagccattcattcattccttgaaacaaatgcttattagacacctgcttgttaaatatttttaaacagtagtaaataaaaataacaatcctaggctttatggagcttatattgtagaaggatgagtcagaccataaacaaaataagttggtaaaacatgtagtatgttaggtagtaataagggcttaggagaaaaacaataacagaaatgggagaataaggaggggcggtttggggaaggatgatgaggatgcttggcgattttaaatagagtaggcacggaaaggtttacgcagaaggcaacatctgagttaagaggtgaagaactgacaacagccaacacagggaggaggattcctccaggcagaaggattggcatgcaaagactctgggctggaaatgggcctgagtgttgggggaacagcacagtggctctgcctgaagaggattatagggcatcaggtcagagagatgggacttttgaggtgggagacagatcttctggggtctttaggcctctgtgttttcactaggagtgaggtgggaactgttggaagcttttgagcagaggattgatgtgatctgaagaaacttccacagggaccactccggggctgtgcttcccagtacgttacgggaagtggtctcctaggaagaagccgtcccaaagttcaggccaacagcagcccaaggggttaaggaatcctggggtctccagcagatgactcaagtttactaacagggtgaatgttgcttagaagtctggacatcccagctgggtgcggtggctcacacctgtgatcccagtactttgggatgccgaggcaggtggatcacctgagttcaggagttcaagaccagcctgggaaacatagtgaaaccctgtctctactaaaaatacaaaaattagccaggcatggtggtgggtgcctgtaatcccagctactctggaggctgaggtgtgagaatcgcttgaacccaggaggtggaggttgcagtgagccgagatcatgccattacacttcagcctgggtgacagagcaagactccatctcaaaaaaaaaaaaaaagaagtctggacaccccaatattagtccatttccatgcttctaataaagacatacctaagactgggcaatatgaaggaggtttaactggacttaaacttcaccgtgactggggaagcctcacagtcatggcagaagacaagtcatgtcttacatggatggcagcaggcacagaaagagtgcttgtgcagggacatttctctttttaaaactgtcagatctcctgagactcactatcatgagaacagcatgggaaagacttgcccccatgattcattacctcccaccaggtcccgcccacaacatgtgggaattcaagatgagatttgggtggcacacagccaaaccatatcaccgactataatcatctggagtttccccagggccccaacccttgggcaagaccattccccaaggaaagacacatggcaattcagaagagaggtggcagagtgagagggaagcctaatactcacgggagattcctgaaagaggaattcagagtacagatgaaaacagaagccaaaacatcccaagaagacctcttggggagatttgagctgcaggaataggggccgaagtcacaagaaagtcatgcaaaacctaaacatcccaggaacaatgcctgagcatgaggcaccatatggaatcccactgatgagggtgtggaaagcagctcaggagcttttctcctggaggagaaggttggttgggaattggggaaaaccagctgagcttgtaggtgggaaaattgcacttgaggagctagggaggtggtagaaatcctactagaggtggcaactctaccatatgtccttccacttccttctcactaagaaggaatgtgagtacacattgtaaaagttttgaagactgttcagagggacataaatacatgcccaagtcagcctggccctttcaggccaaatgtaagccactcactcaaagtgctcacccctgcaccactgtgattgtggatgtgggtttcagataaagccccagtgcctgttacacacacctatcccagccttgttaggaaggctaaagcctgaatatcttggaattagaaccacacaatgtttattttatggccatttgggagcatttacaatttttactacctgcctttagctgcgacgtgtgtgccaaagcttcctactggctccatttgtaagaatcagagattgttctgtcaggaaatcttttgactgaaaggcacccagaagtgttagttctatctttgctggtggttctaagtaatgaacaggcctcccaggctaaattagacaaaccgaagtgtaattaaaaagtaagccccaggttaaaagaagtatttgggtgatgaggaaaattaagccgacagtatttcatctcccaaaattgctttggggattaaataccaacgtgctttggttaaggattatgcatttcaaatgccacatccacagttcgagagttaagaaagaaagcatggcatccgtaaactccctgtcagatgtttactgaaaacttagtatttgcacaacattctgatagacactggagacgaaaatgaataaaacacgatcaccacacacactcaggggatgtgtataataaacagtactaagaaatgaaataataaaagcaggaaaaaatggatatgaaagcacagatataactatttgcctaactctatcaatcgataagcacctagaggatatttttgatgtaattgttcatatcatgatacgagatgtaaaatgcacaccaagctctgtagactctacttttgtgcaaaaaaaaaaaaaaaaaaaaaaaaggatctgtgtccctagagctctacatctaaataactctacagtctggctactcaaagtgtgaagtgtgggccgtgaatcacctaggagtgtgttagacatgcagagtctcaggccccacttcagacctgctaagtcaaaatttgcattttaataggattcccaggtgtcttgtcatatggtcaagttgaagaaacagttttagagtgtgtatcattgccccaaatgcattttagagtaagcctacaatttccgttatttgaaatgggaaatacagtgagctctttacagcttgtcatcaagttgagtgtattatctgttggtgacgaagtcatagttcctgtggaaatcacccctgtggttccctccctacatccacagtagaaggtactggttgctttagtcggaagtgagtgaaaataaagatggaagttcctccaccccattcacgtgcttgtgctccatgatatctctcaatgaacagcttgggggtctgtaaaccccaggtaaggacttttgctccagagaagaactacagggtcagggaatctgttctaattcatttatctgtttttcatcaactgctactggttaaacctgtgtttcgtctataccattagggtgaggttttaattttaaaagtgactttggtgaggcgtggaaattcttagggatttacctgagggtccccaatcactctgggtattcagctctaccatcacattctactaaacacccacagcccagtgagcagggatttcgttgtaatgttaaggagtttttgcttctcagccacagatgtgctcgacccaccattttgtcttctttcttcttcctcctttttagcggctttacaaagagatttcctcatttctttcacagttaccgtatgtgttatcctctgcagagccttgctttgcttcactttgctttgcttcctgtcttttctcccctttcccatatctcccacatgttctaatcacatccattcacctctttctttacatcaaactgaatggctcgcgttcttcttacaatcctcatgtctgtcccaccagcaatcatttcaggaccccaaaccaacgttagtaccatcaaactgagttcagccccagaaagctaaaaagttgtgtttcagaccgcaagctctgggcagatacagatcagctatgaatggacgagcccaccaggacaagcaatcaggtgctgagtggggggtctagggtcatatgtcctcatttcaggccactgctcctccaccaagtcactgcatgaccacctgaatgtcaattttctcacctgttcaatggagataaaaatatctcttacctcatgaaactgtaaggaggaacaacaagataatgcacctaaaatattgtttttaatgaaagcctttttctgtacaatacctgaattgactaggaaatctatatgcacttcaaatataaacaagtattacagttttttatatcttgctacagcttgagggaactcattgtctctccttgaatgatttctaccagcactatgtgctctcccagctatctgggagccacacttgaatgttctcctttctgtggttgcctaggtgatgtatatgtgccaggagtaattgcagtctcaggaagtatccctactgtcagttgtggtagtgccatctgtcttcctccaatatttggactttacatagggtcattttttttttgaaaaataatttagctttcccaaaaaatgttgcatttttctactaaacaagaaatgacaaataagcaaaagatgttagtagtgaaataagaaataaaataattgttgacatttttgtcaattttcctgattattaccccagtgggattcaaacacacacacacacacacacacacacacacaaagatccaaatccatatagttttcaatttgcttcttttacttagcattatgccatggtgatttttcatgtcatgctttttaacgctttttcatggcttcgtattactttattgcatgaatgtagcttaatttatttatctagttccctactcgaggtggtgtattagtccgttttcacacggctgataaagacatagccaagactgggcaatttatacccaaactgtgaggtttaattgaactcatagtttcacatggctggggaggcctcataatcatggcagaaagcaaggaggagcaagtcacgtctgacgtggatggcggcaggcaaagagaacttgtgcagggaaactccccaatataatactattagatcttgtgagacttattcgctatcacaagaacagcacaggaaagacccacccccataattcaatcatctcccaccaggtccctcccacaacacatgggaattatgggagctacaagatgagatttgggtggggacacagagccaaaccatgtcaggtggcaactccacattgaatagaagccttggtcagactttcacattcattttttctttgctcagcaaggaaaaaaaatttcaaagattattataacattgagactcaaataagcagctattttaatataagttctatttagctatggaaattttaaaaataagaattttataggtgtgaaagaatatctcatagaatgatcaagatgcttgacttttttgtccaagactttctccttctgaaaagagaagggagctagtagagattatagctctgggtagacagggccctctctgtctgctcacagaggaaggttggaccatcaatactagcatagtactggcacatagtaggtaaatattctttgaatgaatggtcaggtcacactcccatataaacatcttccttgtttttgcttttgtttttgtttttttagagaccaagtctagctttgttgcccaggctggagggcagtggtacaaacttggtgcactgcagcctccatctcctgggctttagtggtcctcctacctcagcctcccaagtagctgggactacaggcacgcaccaccatgcccagctaattttctctattttttaagagacaggtctcactatgttgcccaggttggtctcaaactcctggctttgagtgatcctcctgcctctaccttgttttcaaattgttggtgatgtgcttgctgtgtagatcattacttagttcagatgttttgtaaattaatttcttgtagaagaaaaacaatgtatagtgaaaatccagagtaaatgctttgactaaaaggaaagaaagaggcatcttctttagacattagtggaagggaaaggaagatgtgttgagcccgaaatatgaatattctagacttggctttttgcctatgttccaagattatccttcttagaagagactccaaacatacaaatttctgtccacatattttttatcccttttgagttagagtcaaggaattattctcctccatggaaaccattttcttgccctcagatgactaaaccaagtgaaatttagcagagttgagaacaagcgtgaagttttattccccagggcctttctgttaactccttaaaaggtttggaacattgagctgggagagttatcatgaatggcaaacaaaccagcaaaaagtaattgagatgtgtctgttcctttgggacagaaaagaaaatcataccaaaagtgaaaattaaatgttgtttactaccattcagtttaccacataccttcttaatttatttcctaggaagtccaagtgaatttttgcttcttctctacctttaatagtcagtttactttcagagttttgtgactaataaatgatcgaatggctctttgaacagagccagcctgctgataaatacaccaaaagttagtataccttgcctttatgttagtcacaaagcacttcaattattatatgaaaaatcactcttctgggtactattttcacatcttatgcagtaagaactttgagcccaaaacacagaagtttatcttgtttagagattaagcagagttgttttatttctgtttttgtttgtttttattttatccttattcttttgattgcaagccacagaattccatgctggactaacttaggccagaagggtatatactagaaaagtacaaagggtatatcacataagaaagggggctgtccaaactctgcccctgcttttctctgcatattagtgttattcttttccaaagtagcaagacaggcttccccttggtagaaaatacaggcactgatcccttctgagttttatttctccattgacatgtaggaaaaatcttggggaaaaccttgtttgggtcccatgatgaccaagtctgcaaccagaagtcagagtatgactgacccaacttggattaatgcctcccctggaccaattatcttggccaagagatggggggtaaaatatacagcagctcccaagggaagcatgtgggtgaggccattctcagaaagcagaggaagttcttcctggagaagtagttagtattgggtagagaaaactacaggtgtacctcacatcctctctttgtagcataaaaaagagataaattattgatgcccatataaaatcccattgccaatttaatgtgagttgggcggtagtggcatactatttaatattaacaaaatcataatattaattattctgtctcctggaggttcagtagacaaaatttaaataaaaatagtaaatgccgtgtgggcagaacttcagtaggagtgagggtcttctgaaaactagctgaggtcgggctcggtggctcacacctgtaatcccagcactttgggagactgagaagggcagatcacgtgaggtcaggagttcaagagcagcctgggcaacatggtgaaaccctgtctctactaaaattacagaaattagctgggtatggtggcacacgcctggaatcccagctattcgggaggctgaggcactacaatcccttgaatccaggaagtggaggttgcagtgagccgagattgcaccactgcactgcagcctgggcaatagagcgacactgtatctcaaaaaaaaaaaaaggctgagatgagcagaggtggggctgtgtagtaaggcactgtgggggagatgaaggcaaactgagcacagtaggacatttacatattttacatattaaacagatatcctctgaaaacatatactccttgggattctagggaaacaccattttcatttaattgcatgcaaaagcctcagtttaaaaaatacacctggatttcacattaagatgctttttccggaaggaacaaaatttagcttgttaaacaccaaacctatataattttaaaagtatttccaataaggcagcctgtggcttgaatgtgagctttcagagctatcgctgaggtcgggtccagtgtagttttgaaacttaaaagatttcattcacaatcatttttttcagtgcctattttgtctagagcctgggattctaaacatttattaagaatggaaggttgaaatggtgacatccctttgtgggagcaataataagatatttacatacaaaaggtatgtctgtaaatgataccctgtaggaaaaaccaattagggggccaacacccagagttatctgggcagtcaaaggggagaattacctaaggctggcttagaaagggaaggggcagagagaaattgaaatggtttcttccagattgtctccatcttccacaaccaccaagacaatgcttttcaaactctaatgtgcactcaaatctcctgggaattttgttgaacatgtagattctgacttagttgatctggagtagggcccgagaacttacatttctaatgtgctccctggtgatgctcttgccactggtatgtggactacactttgagtagcaagatctagaaagccaggtcgtcagctcagagtttctagaacagtgcctgctatttagtaggtgcttaataaatatccattgcatcgtggctgaatcagatagtttagataagtgtgtgttctgggaccacaggaggtggaaacttgttctgcaaggggtaaagggcaaatgcagggggtgtgatgggagccaagagggaggcaaaaggacgtggcagacagggaacttctggggagtctggagggagtgtggcactgacagtggtgtggagcctgacaccaaaccaacataaaagtcagaactgagtgggcagaaggtctgtgagttctccagcttagtctcaatattgactggaggccgatgctgctgaggataaaggcagtaggcggaagggaaacagcacatgtgagcagatgctggcataatcaagaaaatattctgaagtcaggtgaatgatagagatgaggacatggaaacaggaatataattgttactgaattcaaaagagttgctgggagacttagcagtggcttgtagaatgagggagggtccaccaagacaacctcccacttcaagtctggcacaaagcatccaaatcacctcaggagattttgagaatattgattcccaggccctacccctagacatttggagtccataggtcctggaatctgtatttttaagaagttcccccacatgattctgatgttgcagccaaggaaggtgatccctggataactctctgtaactccttcaagtggttggaagaggagaaaagccctctagggaagggaaggtgctagtgagaggacactttcagctaaatagagacgttgcaggagaccccaaggaaatggccagagtctttgcacactggaattttacatctagacagcttgacaaatggcatgactacaaagtaatgcctcatgatttctttaattgtgataatcatgattaggcaatcccttttgaatgatcaaataggctttctgctggcccaagtcctagttaatatttgttcagatttaatccacttcacagatgaatgcatcaaatttcatgataattttaaacgaatgtggattccgtatcgtaattctcttgcaagccatggaaccttatttgtctgggtttgtacccatctcagccacttaccagctttggggccctgagcccaggacttgagccagatgtgtcagcgtgttcttatgtaaaacaaaaataataacaccaaccgcatagggcaattctcagaattaaataaatacatgtgaatcttttttgttttttttttttttgagacagagttttgctcttgttgcctagagtgtgcccagagttgctggagtgcagtggtgcaatctcggctcactgcaacctccacctcccggattcaagtgattctcctgcctcagcctcccaagtagctgggattacaggcacccaccaccaggcctggctaactttctgtatttttagtagagacagggttttaccgtgttggccaggctagtctcaaactcctgacctcaagcgatccacctgcctcggcctcccaaagtgctggaattaaagtgtgagccactgtgcccagccacatgtgaatcttttaaaactaggcctgacatatagaaattatcagttaaagtgttgtaggaccctatccttagttcagctaaagacgggttccttgtcacatggccacaaaaagttaggcttgaaggcaatttgaagagtgaggaggacagggttttattgtgttgaaaggaaaagagggaaacaggttatctccacaaggctggagtccctgctagtgtgcttcccaccttgcagattgaattccaagttccacccaggaagaggagtggccaggctcctccctgctgcaaatggggtggatttctgtggctccacctcagtgtgcattcctcccagtgagcaggcccgttgcagtttttccggggactcccttatacttggctgtctcaaaagtttgtggtattatgatttgtcttgtcactattacagctgccacttatagaagactagtcaactcagcttgccttatatgtttttgggaaagagaatctccatctgtgggaaaagcagtgggggctttcagaggatgtccacactgtctatttggtgctccagtaagaagggttgagtccagttgctacagccacctgaaaaccttgcagaaggttctccaggttcctcatgaggaaaaaaggaaaagattaccaggcacaattacctttatgtaattggcaaacacttactgggcatcaagtgaatattaggaattgtgcagaataccaaggatacaaaaacacaattgatgcccccttggggcttgatttgataatagatgtatgacaataaatacttgcgttcacagtgatgtagtgacagttcattgaaagcacaaagagaatttctgatgttctttatatctactggaaattacccacgcaagaacataaatgtcaacttctaagatgggaaactcatgttatcctcaaagcaattcaacaatgaatgatagttgtgagccaagaattataacttgctgttgattataacttacatttgtgtcatacttatttttattttgagcttcacagcacctccaaagacataaagacagtgatcaactgagaaaatgtaggttctgaaaatgtagggtcttgccccaaatttcacttttaataagtcttagggtagagattggaaccaggttctacactgtaagttgtctttgcactgagctgggctataataactgccacaacaatctaatgaattctgtttaattaaaaagagataataagaagaatttcatattaaaacccataagcctagataatatgatggttctaaattgtcctcattgccaatgttagatgtctgacaactttaactattgtgaaacatccatcacagatattctaactatagattctgttgtttgagggaggtgggaaggaagctctgtttgcaatcatttgaaatagcaaactgacattttctttttccagcttattcaaaagttgacggatgtcgcagaagagtgtcagaacaatcagttaaagaagctcaaagaaatctgtgagaagtaagccttcattcccattacaattgacatgtgcatctgaatttattcaacacaaattcccatctgatttgcctcttttttctcttttacttccattgtgacttcagagaaaagaaagaattaaagaagaaaatggataaaaagaggcaggagaagataacagaagctaaatccaaagacaaaagtcagatggaagagtaagtcaaaagtgtcccctctcccaaacagttcatctgggaattattttattttgtacgtcagagtcacaggttcataaccagtcaaagactccttcgtgaagtttctcctctagtcagcctttcaaaagattcttttggtaaggtttttaacagggaaggctcaagcaaagactggttcaataaaggagtgaggcacacccagggccttttagataaagagtaagcaaagagcttccctcagggaaaggctaaatcctcacttcctacccataatcttcctggcatttagtgaaaacagagcctgtgccttgggaggaacctgacctttgtccaaaggctggcagattataccttccttgtagcagtaataagaatgttgctatggctcacacttgtaatctcagcactttgaaaggcctaggtgggaggattgcttgaggccaggagttcaataggggcctgggcaacacagggagactctgtctctacaaaaaaattttaagattagctgggtgtggtggtgcacacctatatttccagctactcagaaggctgaggctggaggatggcttcagcatgggaggtcaaggcttcagtgagccatgatggtgccactgcactctaccatgggcaacagagcgaaaccttgtctccaataaataaatagataaaaataaggaaaaaagaaaaagaatgttgagagttctgtaaccttttatctagaagtctgagattaccatttgtcaattctggatgaattggtataatgatgtattcatcatttgcttttagggagaagacagagatgatccggtcatatatccaggaagtggtgcagtatatcaagagggtatgtgggctcatcacgctctctcctttgcaaaacatgtgtgaacatttggtgagctcgctgtgagcttctggaaggaaatgtcatgccttgccataactttttatcactagcacctagcagagctgtttcacagggtgggcactccttaatcaacatttctgcaagttgaattgcaaaccactttgtaaaaggattcatctaaaaatagagtcaagtcatttccaaagtcaagagcccagaaacatattgtaaatgatagtgttcccaaaagaacctttaattgtcatcaatgatagagatgatggcaacctcgaagggctgtcctttttttttccaatttaatgtcatagaaatgtttacatatttataaaaaggtaagaacagtgcagtccattgatcaccacctcccacccttatgtttctgtcacctagcttcaacacttactacagtttcctatacttgtaagtgtagttcttgatcaggagatcaaataatcaaatgtaagccatagatctgaaaagctttcggtattttctgaaaacgtgcacttttaaatgtttagatgaaagtaatgtttcttgtaactttcttatagctagaagaagcgcaaagtaaacggcaagaaaaactcgtagagaaacacaaggaaatacgtcagcagatcctggatgaaaagcccaaggtaaacggaactgaattaaaatgaacaattattttatttgatttccatttagtaagagtaaaaccttcctggtttacataagtaccttgtacacagtctcagatcagttcttgcatatgaaactcatgtatctttctcaatgaaggaaaaaatatagcaatattcagtaagcatttatcatcacctggtgagcttttaaaaactgcaaatatgcagaacccagccccagagatttggctttaactaatctggggtatggctcagacaaaggtatttttatagtccgtttcccctggagaatcagagactaaccaaaccttcagtttgggtactactaagtaaacgtcagttctaaatagctgatgtaatgttgtaatgccaccctctgtccagcagaggatgccctgcaccaaaatcactttggtttttatctagcaaaatagtctcataaatcagagaaaagcaaatcttttgtttcccatagtaacagttgattggggctctgctttaaaattatcttatgttcattgtttggttaaaattaattgtcttatgaatattaactttgaatgaactgagtatctgtagatcaaatactttgaggttaccaaatggcatctcagttttagaacattccttccattttgattcatcactgaatagttttctgtttgtggaaattgtgtttttcaattttcctgcgcttctattttcaatttaaaatatctactctaaaaagtactgccattccacacaagcatttctcgagtcctaaaagttaaaaaacgttagttttatttaattgtatgtttcattcaccagtttacttcttatagatttcttatggataattctaaatatattttcatggttctttgtgctcttatgctttcatatttattatataagacatttatttaatatttttaatttctaagtttttagggttggcaatatagattctcaagcaagaattaataattacttagatatggtgctaattcttacgtttctcctataaacatataatgtagatcttctcagccaccctctcaggttgattatgcactaataaagtggaataaattttaacataatttcagaaattgctatactttccaatcagaattgatctttttaaaatgctcaaattatttagagcaaaagatccagtttgactgaaatttaagaaacactttaataataatcagtctcaggtgatatattcagatacatacatttctaatctatgctgtctggttttaaatttgtcattactttgtacactgacataatagaatttgcttatggttgatggctcagctagtttttgtatttcaaaaaaatttaggtaatatggttcttttcagagtttcattttgcttttttttttcatgcgtgttttggttcaacaatgttaactattttacttacagataaaatgtgaatgtaaaatcattaatgtgtttaaattatataactctcagtatcagtaacccatacaaagattttcatgttactgctctaggtcatcatgattaaaatcaacctcagtaaatgtggaagcacccttaaacttcttccctggatataactggacatgaaaagaactaataacttttggctgatttattagcagtcagggtgcattcagctgcaattttacaataagcccaattaaaactggcttcaacagttatagtatttagtaagccacgttactggaaattcagaggtactacagttgtaacagtgattaatttagtggcttaacaatttcatctccaggtatttttagaatttccactgttgttgccttctagatccagaccgtgaactcagtcatgagatggctgccctagctccacacatcataaccttacatgaaaccactcaaaggacgtgcagcaaatgtcttcattttgtaaccctttctaggattgagaaaaaccttcctacatcccccctagctggtgtttcctcattgggtacaatggcctcatattcccattcttaaaccaatcatgggcagtagggtatcactttcatgattggcttagagtaattaagattcactcacaaggctagagagagttcagttttcctcagttccatggtcatcaggtacctgaacaaaactgatattttatcatcaaagaaatagaggggaaatagcaactgggtagacaggttacatacagtgtacgttacagccatgtttataacaattttttgtttcttcctttttggccccttggaaagagatctgaagtgtttctatgaatttttagtagttctattgtctgcgttttttattgtaaataggtaccatgatgaattcctctgtgcttttcttccatgaggttgctccatgaccatctttttgtgtctggatttgaaggttgcccatgaagattgttggttccatgtcaaactaaagcatttcttgagggtttttcttcatggcttaaaaacgttgtgccttaaagctgtgattttattaataaaataataaatcatgactgttaacattgtaggacatggtggttaataaagggaaatgacaatgacaacaggagcagcaatagacagtagagtaaaagaacaaaatcaagtgtgagacatgtgaagaaagaccaaagcacaggacagcaaagtaggtattaataaatgggtggtgaggagaggccaggccagcatagcagtcgctgatgctcctgtaactgtggggcatggatggaaaatacagtaacactggctttgaaataatccctctccacatctagtactgaaacaggctttgaatcttgacatagacatgagggaaattagcaaaagcagaaacaaaacaaggaacaacccaaggaaatgaaactgatcaatagtatctctaaaacaagtccacggagtcagttccattcagtcagataagaaaacagagtgatttcgtgacatctagaactttatgaatggttccattactgggttttggatgaggaacgtgagctgacattgcagcaggtaatattaaagacaattgtaaccttcttatgaagaagaaaccatgccaaactttgccacaggttactgaggagaatagagttcctccctcaactaatttacagatggtatcggggaatctgccccgatattcacgtaggttcttttctatttttcctaagcatcggctggcttgagaaataaagggacagagtaaaaaagagagaaatttttaggctgggtgtccgggggagacatcacacgttggtaggatccgtgatgccccacaagccgcaaaaaccagcaagtttttattagagattttcaaaagcggagggagtgtgcaaataggtgtgggtgacagacaagtacttaacagggtaatagaatatcataaggcaagtggaggcagggcgagatcacaggaccacaggaccacaggactgaggcaaaattaaaattgctaatgaagttttgggcaccattgtcattgataacatcttatcagtagacagggttttgagatcaactggtctgaccaaaatttattaggtgggaatttcctcttcctaataagcctgggagcactatgggagactggagtctattgcatctctgcagcctcaacagtaagagacagctatgcccggggggccagtttagagacccacccgcaggcacacattatctttctcagggatgttccatgctgagaaaaagaattcagcgatatttctcccatttgcttttgaaagaagagaaatatggctctgttctgcctggctcaccagcggtcagagtttaaggttatctctcttgtttcctaaacattgctgttgtcttggtcttttttcaaggtgccccagatttcatattgtttaaacacatgtgctctacaatttgtgcagttaatgcaattatcacatggtcctgaggtgacatacatcctcctcggctgacaggattaagagattaaaataaagacaggcataggaaatcacaagggtattgattggggaagtgataagtgttcatgaaatctttacaatttatgtttagagattgcagtaaagacaggtgtaagaaattataaaagtattaatttggggaactaataaatgtccataaaatcttcacaatccacgttcttctgccatggcttcagccggtccctccatatggggtccctgacttcccgcaacaagatgggatgaagttttttaactagaaagtgatcatagctaagtttttgcacacaccaaaagtatgtataggctacatgacatcatatttcttcctgttcttccatttctttcaccatgttgttgtatataataatttactttctcttcatccacttattctaactaatgtaatagtgtgtttcatgttcctaatcttgtcttaacagggaggaagctctttttttacattactgtttgctctgggatattactattttgagctattctgaaccttgatcaacttagaaaatcatatcaatataattttctaagccattggtaaataaacaactcctttgaaagtaacaaacagatattttgtaaatctttcagcaaaagaaatttgaaaagccaatggctcaaagttaacagtttttcagtggcaaagaagtatttattctggctcaatttagagcaaactacacatgaaacctcattcaaagtgtgactttgctagcagtttactcaacaatgggcatgtcatctagagttcccaacatttttaccatcctgcaatagcagtcataggagaatatgcctcaatcaaaatcaggctaaaaatttgtttcaattctgcatgtgagctgggaccttaagtctttctggtcgctatttggtaggggaccaaatgtggccagtcacactggaaaagtttattttagattgtcccactttgtgacatgcactaggatcttttcatgtggagagttcattttttccctatgaaaaaagagattcaattagtttattcattttgtaggtaattttgagggcattggggaaaacagaagtaggtggtccctcgaagcaacttgtacaataaaatattttggcctcaatttgacacaaaatgatgttgtacattgctgcacataagtcccatggaaacttattatgttataaacaacaagagacactcttagaagggaatacttggctcctttccagtagagttctgaattctggagaaacattcgactgcatgttttctagcaatgagatattcgattcagtccttgagtgtatgtgggtttcagttttgtttgagttgtggctttttatgaaatccatagtggtagaattttcaagatggacgcagtaaacactggccagtcttctgactcagtgaaataattggtttcctggggatttccatacctgggtttgccaaagccagtaggaaacatggggaaaccccatctctaccaaaatacaaaaattagccaggtgtggtggtgggcgctggtagtcccggctacttgggaggctgaggcaggagaatcactggaacccgggaggcggaggttgcagtgagccgagatcgcgccactgcattcaagcctgggcgactgagtgagaccaccctgtctcaaaaaaaaaaaaaaaaaggaaaagaaaacacggttagtcacaagttgccttgagtctgttgtgaatatgccaatgtttattgatcactttgctgctcctgactctctttataagaagaatcatcttttgaggggaatatttaatgaactatctccataacctcataaaacagtcaataaatgtgtaatttactttttctctgatgcttaatttgtctttgatgcttcttagaacacaggttttctgcttaatttagctcatcatcaagagagaattccgggaagctttagggcattttaattcattcccaaagaacatttcatcatgtagctactggctcttttttttccctccaccaagggaatatagactgattttccttatttcccctctgacatctttgtaacagggtgattgactcatccctctgcttgaagttagtcttgttagacctaccgctgggctctgagacagaaccttaaatgcggctgatatctcctgtgtttgggagagaaaaggcaaacttcgggatttaaaataaaatattttttaaagtaatgcatttgtgcctcctctaatcttttgcggcttgatggggaaatggattcttccttgccagcacttattggatcttctcccagaagccaaacttgcagagtggaaactggctgcttatagacagtgtttctgctcattgtcaagtctcaattaaccacacagtggtttgtttttgtttgttctgtagaagaaaattctttttcatttttgtcaatataaagaattgcctttttaggaaacaaatatagttatgccttattttcttgagtataaaacttagacatgtttactctccttctgggcaataccagggcattggaacaattttaattccactggtccctcatcagtttatttttgaaatttaatctaatagacttttaaacacataagacattattctatgttttgatcatggttcatttagatatgtctacatattcacatattctttgtgaaacgttttttcttgtatcttctgcccatttgggatcatcatcttgtacttcctctagaagttcctttcatgcggtctactggtgggaaactctttggagtttttatttttgtttttgtgcagaaatgtctttgtttgtttaatgtagtaatagatgagaatctacatttcctccattctggaatgatattttcactggatataaaattttgtgttggtggttattttcctttagcacactgaagataaacttccaccaccctctagcatctattgctgttcttgagaggttaactgttagtcttaatacagttcttttgatgataatttatattccccctccccccaccgacagcatttagtatttttttcttacattttgtgcagtttttctatagtgtgtctaaatatgtgtttgagatggctagatggatcactttcctcagttctgcaaaaactctaaactatcatgaaagcaaatatggcttctgtcattttttttctttccttctaagattccatatatatatttgcatataaaataaaatgaacatttttactccatctcctctgtcaatgaattgtttttagtattttccatccttcgtctttctttactgctctgtgggcaattttttttcctacactttttgcaatgcaccaattttttgtttaaacttctattctatgcatccactgagtgtttaatttcaggttttgtattttatttccagatgttctatttggtttattttcaaatatataatctgtatgtcttagcttgttgcagggaagctttcctgtgagatttctcactctgggaaagcctcagctcttgactgtaggctcctcacctttcaaggctatcaaagggtgaacacacaatttccatcatgagcaaaagcctatcagggcaaaagcagcttccttgcttattacctttctaggttcaatgtccccttcagtttgaccctgatcattaagttgttgtagttctctgggtctttaaagatagttttaatggccaggcatggtggcttatgtctgtaatcccaacactttgggaggccaagacagcaggatcacttgaggtcaggagtttgagaccagcctcgccaacatggtgaaacactgactctattaaaaacaatacaaacattagtcaggcatgctggtgtgcacctgtaatcccagctaccctggaggctaatgtgggagaattgcttggacctgggaggtggaggctgcagtgagccgagatcatgccactgcactccagactgtgtgacagcgcaagactctatattgaaaaaaaaaaaaagctttagtatcaaacccagcttcttaatttttttcagtggaaaggatggtccaaataacctaatcagccattaccagaaatagaaagtccccacattgcatttctgaaatatttgaattagttaacatctgtatcagtcagggttcaactagaaaaacagagccagtaaaagattgtgtgtgtgtgtgacagtaattggcttatgcaattttggtggatggctatctgccccgttctcaatgctgtctctctaatgatggaccctagcaggcaggcaggaaaggaaaattacaagtaggcttggtgactagagtaacctgcagaagctgagcctctttgtcacagagttgaacatacacacatacacacacacacacacacccctggcccaggagtcagacaattaaaggaagacccaatgggcaggggaagtgattgcaggctcagctgctgcttcccatcaaccagacacataaatcaacagatcagcaacaatgcctgagtattacacaatgactgctgactcccccatcagccctccaattctcagaagaatctccatggaacccacaatagctggaaacatacagaaagggaactctgggaaatatagtttggctgagacagttggcacaataagaagcatcacactgttaagtaaaaatcagaaaatgttttatttcaaaaatactctgtgtctcttgaaaaattagattctaagattataatagaaacatgcaaagaatttctaaagctaagaagaagctgtcccttagggctgcatggtactccctaggctgtttcaaagattgctattgtctattggccccataaggtaactgagtttgagatttaaacaaaaattaaaacttagattcgcatggatgccgttgattcctcccccttttctttaccatatcaactttctttccccctcctttgtccatatttttctttcttgaggatgagaaaatgtggacatatggtgataaatgtactggatagagggcagaggctcagaagagaatcttccccacctgctagagtagggggctacatgttggtggggttcagcgtcttcccagcaaacaatgattttaacaccgggaataggatgaggtggacttttatcatattggctttcatctgcccacctgccatacatgaaaagtccacacaaccacggatggaaaaccttttgggtttatttccacttctacttctgtgtgcctgtcattgggcatgatttctgtgaattttgctaatactcattagatttttttaatcctcaatgtatctctgttttttttaaagccctattttgatataaccaggatagtgaaaattatcaaacacacacatccaaaacactttaaagcaactaatgtaaaattttaattgatttctagaaaccaatagctgatttaactatgaccttcaatattttaaagggaaaagatggccaacctcaaaccaagagaaatactctcatcccttggtatctatggatggttggttccaggactcccctcagatacccaaatccacagatgctcaggtcctttatataacattgtatagtatttgcatataatctatgcatattctcccatgtactttgtcatttctaggttatttataatacctactacaatgtaagttctacgtaaatagtgttatactgtattgtttagggaatcatgtcaagaaaaaatgtctatacatgttcagtacagacacaaccatccacttatggttcttctgaatagttttgatccaaaagtggttgaatccacagatgtggaacccatggatatgaaggggatgactgtatttacctacagaaaatccaaagaggaaatctactagatgctttgagatatttgatgaagaagtacttggagatgagagaaaaggctattgcatgagggcaaatgcaggcatactgggctgaagaaaacactgaagaaatttttccttccaaataggaaagcagttgccaagaacagcattacagtctctgttttccatgtattatattatatctaaggccatattcatgcagcaaattcaccacttggagtgctgtttatacattttctgtcaacagaaatcaacagacacaagtgttctgtgtttattataatcattagttgaggttaatctttgatttgtcaaggaggtgtttgaatttcctcaaataatattttcagattttgaagagtcacacacacacacacatatacacaataacacatttatacagacacacgaacaactttatacaattggagagaagcttagcagattaaccattttggcatcaaaatggatttcgccctatctaattatgctagtatataaaaatttgtgtcaaagagagtagccagcagcatgtgcctgtgtttggtacataagagagaatagaaaatacattgttttctatctttggctgagaaagatttgtttcctttttctttgcacctttcgtattatccaaaaaagaaaaaagcttactcttaggttttgcaaatacacagtgagctgttacaattcttaagtttcttattgggtctgtgttttaggtggaaccaaaaaaccctaggacttgaaaaaaatattgtaaagcagtcaagacatctttataattgttgagtaccaactgcagtgcaatcactttagtcaaagcctccatcatctctcccctggatttctaagtagcctccaaactggtcttcctgctgccacatgtacacactcaaaatctattctcaacatgtcacccagaggcatccttttagaacacaagttaaatcaggtcactcctctgttgaagacccttcaatggctcccataatcctctaaaagtccaatacagtctaactccacttttgctgcattttttcttcccttcctccttgatatactctctgctcaggccacactgggctcattgctaggccccaacaagacaggcgaatcccaccttgagccattgtttcctcatctcccaagtgtctgtttgggcaactctctcctgtctttcaaatgtttgctcaaatctgtcagaggctttccatgaccactttattaaaatttacaacccccctccaccactctcccatccctgccatcctctctcctgtttattctgctgtgctttctgtttttcatagcatttgtcaccttctctcattcagtcatacccttctttcctaagtgtgtccttgagtactgccccacccatcagaatataagctccacaacgggaagaggctttgtctgtttcgttccctgacgctcttgagttccagacatccaagaacatcgcctgccatatagctggtgtccaataaatattttttgaatgcatgatgtatgtagagggctaacaacattaactttgtatgttaaaaaatagttctggctctttgcggggagaaaagtagtgcccttaagcccagactccttggactgtgttgttcactgaacaaacagctgtcaatcattcatcactatcttttctcaagtttcttgatggtagtgggattttgtggagaatatctcaaaagtaacagctgtgatcatttttaacaactaatttttacagagagtggggaggccgaggagaactcaatgccaattccattgcatgtgtgggaggccaggtgccttgtcacactgggggtgttggagcagataaaggcaaacagaggagttaaaactgtactctagaaggcactccaagagacgtcccagacaaataattggaaacaccagatgacttagaaatcaatttcattgccacaaaaatgacagcctccctttttttccacacagggggaaggttcctcctcattcttgtcggaaacttgccatgaggatccctctgtttcccccaactttactccccccaaccctcaagctctcaagtggtgaccaccgtccttccggccaggtaggactggatgggaggggtcgcttttgagagaagggtggtgtgtagccatccagttttcaggcatcacggacttgctcctttgtccttcatcctccctttctctacattcccatcttttttttctgctaaagttcccagccacacccatgatcatttcctcatcctttctgccttcctctggtattaatttctccatcattgtgctctctcttcctgacataaatctcattcttccatattgtcttcttcctctttctccattttgtttctctattggcaaatttggcttcctttttaatctggattttctctcttgcactcagactattattcccactttggaaacatttttttttccatttctgcttctcactacactgttttcccgtggtcctattatcttacaatccagtgggatcaagttaactctcaaggagtctgtttcaatccactcccctcaacttaccacagccctccttttggaagtccagcaaaatttactttattcccacatggtatttagagtgaatggggacagcttgtgatttcctgattctctagaagcaagagctcttggaaatatctcactaatagggatgcttgggccaggagctctttgtcagagcaaacttcagcttgaaaatcagagcagactttaacttacccaaggagatgcatcacgaaaactattatattcccttcactaataagaaaactagcataagccattccaaagagtgtgcaattcttagaaaaaagaagcattcttgtgattataaataaagcaaactttattctaatgtaatgaaaataaaattctacagtgagacttgtactgtttttgtcttcaagtatttgttcatctgtgaaataatgcagtttaaaaacatgtcaaagaattactgaaaataactctttactgagaaagaggtatgagttattcctcttcctcgacatcagttgttgctctggctcagagcttttcagacctttgtgggtatctgaattacttggacatcctgttaaactgcagacacttatctaggatgtctgagtggggccggaaagtctgcctttctaagtagctcccaggggatgttgatgctgccacagttccagggagcacattttaactggccaggatgtagtacattcctacctccaggcttaagcacctggaagaagcttgaagcaactgtcatggcattttaatgtattttaactttttgacccaatcacaagcctgggcctttgattttttttttttttttttctactgcctgtaacactagaaagagggacacagggaatgccatgtcagaacaaagtcacaacatggctatgaattctgttcatgtcctctcaacagtgatcattttgtttctgtattaccttgtaatgaaggccatattggaaggtgagtagaggaccgacatataatatcaatttctggcttctacaagaaggcatcagggagaccttgacaatttcttcttcgtttggatataaatgttaagactatcttttaaatcatcagtgatgagcaccattcgatttttttgttgttgttactcttgttactgccctggtagttttgtgttttttgtttgtttgtttgtttgtttgtttgtttttgagacattgtttcgctcttgttgcccaggctggagtggaatggcgcaatctcagctcaccacaacctccacctcccgggttcaagtgattctcctgcctcagcctcccgagtagctgggattacaggctccctccactacgcccagctaattttgtatttttagtagaaatgggatttctccatattggtcaggctggcctctaactcccgacctcaggtgatccgcctgcctcaggctcccaaagtgctgggattacacgtgtgagccacggtgcctggcctgccctggtagtttttaaagctattgtgaaacatctaataccacaagtagaatatcttattttctcaggggatgcaaatgacagtgggtggaggagctaagaacacatgacttaggttttatttttcaaaacaaatgcaatagagacaaaaatgctgcatttttgttgctgtgctctttcaggcttgtaatagcgtgttcacaacttgtattccctttagaatgtcaactgagatacccactggggaaaaatatttattttaagaaagagacaaatatccccacaatacctagacttcaaacatttaatcatattgttagtttgtttggtccctttagctttccacatataaaagatgacataaaaataaatatttcacacttttcatgtcaaaataggtctcgtggctaaagcagaaaaagaaaatcccattatagcattttatatttgaaaaaagaacaaaacgttcttttataatagtgtatggaaaaaagatttttgtactaattttaatatttccccaaatgttttttgcattcttgttctttccttaaacatcttcattcatacactacagctgaaaacaaaatgatgaataaaaagtaatagtacataaggccgggcatggtggctcatgcctgtaatctcagcactttgggaggccgaggtggatggatcacctgaggtcagaagttcgagaccagcctgaccaaaatggtgaaaccccatctctactaaaaatacaaaaaattagccgggcgtggtggcaggtgtctgtaatcccagctactcaggaggctgaggctgagatgagataggagaatcccttgaacccggaaggtgatgttgcagtgagccaaggttgcaccattgcactccagcctgggcaacaagagcaaaactccatctcaaaaaaaaaaaaaaaaaaaaaaaggaatagcacataaaggtataaagctgtcatgtgtttgccaaaggataatgttttctattatgatagaagattggccccaagagtagtcatcacataaatagttggaattttacattttttaatttgtgagtgcaaatcttcattggtgaaaaaatatattccttgttatcagctagaccttaataggtgaagctaagtaggtgagttatacttttaactgtggtaacccattttttaaatagctacaaatcactgtagagcgagatataaaataaacaaaaaagatgtttgctcattttatgtatacataagtctttagataaagagctgtagaatgaccaatttctaaaaacaccaatgaaacattagaaaattataaatatatgccaagtaattattaatgcctgctttattctaggatatgccaatttcaatagaaaacacaaaagaacagaaaacatagttcctacatgctttgaaataataaaggtcagtttaaggccgtagaaaggcatcaaaatatttttctgacacataatactaaaaacaaaaattagcatttatggagcacttactgcatcatcaaacacctttaaagcacataacatgtgttatcttcttattcttaccactgtacatttggagaaactaaggttcaaaaaggttaatgaactttactaaggtcagacaagaagtaccagaccttggacacaccatgtgtccttcagctttctaagtatatgtctgaagctaagattttatgatctagatgtcaaagtaggtgacttctctttcttatgttgacatggataaacaagcaataagggtacaacacctgtgcctcaatatacttatctgtaaaatggaaagacgacgagcctctttgttaaagaagcatatctctttgagtggctagaagggatacacaccacacatgtataccaaacactgtttcatttgctggtggcatagcccagcctccacaagatcgtggctaaattgtgccagagatttcacccccaaactgatcacaacagcacaaggcattaaacatcacaggcagcacgttcacattgctcaaagtcacttgtttttagcaaacttctgggagaagaacatctctgaggactagattttagaaaacctccagctctgtgaaaacaggactcacctctaggaaaccacaattagtcacagtttctgtcactgagaggtgggcagctgttttccgtgttcatcgcatctgctggggaagcaatgccaagcagaaggaaagggagacacctgaggcacagtgtggcctgcacagttgggttaagataattttgagtcaaccttccctgtctatggctgctgaaaactcatagttcccctctctaaagcagcaggattgaggaagggctcacccactctcacctccttccaactttggctttcctccttcctctcatctcctctacttgcaagccattcggcttatacatgtcaatgctgtttcaacaacagactcagtgggtttgcttcccctgaggtcttctttctctctctcctcttcccattcctcctcttaagtctgtctcttgccccagccttagaacagaatccttgttaactaacccttcttctgtactatacaagagaggagttagagtacacgttgggctttgcaacgggtctgctttcatttgttaagcaattgttttttatttggatttcatttattcatttaaatatttatgaggccctactacttaccctcaggatgctaggcattctaaaggaatatcttgctagagaaacgtctccgtttagattgtaccttaagtttcagtcacagcacagaaaagggcttctttggaacctgtgacaggtgaccgtcttctccttttcctctgcagttagattcagggcgactgctttgggctaaattatgaaagacttaagcaggagtaaagagatttttctgaaagtaaaaatatctaaatacctaaatagattcccgagggctgttgtgtgtctctttgaagatctttaaatgcggagacaaagaaggcgtctaccagcagagggttgcgtatgtctgagtgacctttttatgatctcttttgagtccgtgaaggatgcgattaattaaagtcggaagtttgtcactgaaataatagttatgagatccagagaattcaaggtgttggaggactcattaagtagttgcataaatatcatgctgaaagatttaatgagaccacagggtcacttatagaacgatggtgcagagatgacctagaaaaaaataaattagaatcgatattgtgcttctgaattaacagctatagattgctatattaacacctgagacataaattctataattatatcttaatgatgaatattgatgttcttgtcacggaaaaaatgaaaattgctcacatttagtattttacttatcaatagtaaaataaatgtatatatgcgtgcttatttctgtgacatctgggaaccgtgaatgctttaagtagctacaattaaatgaatagtgttttttttttttccttttaattcaaccaatagttattaaatgcctactacacagcaggcactgggctaggtgctgggaaaaaacacagatgcacccttttccccccttcaagttgattatagtatagtgctatccaatagaattttctgcagtgatggaaattttccatgtctcagtgtccagggcagtagcaactagccacaagtagttattaaccatttgaaatgtggctgatgcaactaaggagttgaattttttattttattttaactgtttatatttaaatataaatataaacagccacatgcttaatcttagtttctaatgtgtaatccaccgttgtgtcaaaaaggattgcactgggacaaaagactatgttcatcattataaaagagctgtttacatgggaggaaaggctgacacataattgaggaaaccaaggaaggcttcacagaggtggcagtcactgagctgagacctagaggagcagataagaaggacttcctcatgacaatatgaaaaagcctgagatgcgagtatcatgttacttgcatcttgtggaactgtatgtaatttcatcatttgcatgttgtgttactctgctcagcttccacagcaaaatgtcacagactgggtggcttcagcaacagaaatttattttttcacaattctggagtctggaagtctaagatcaaggtgcccgcgagattcgtttctggggaggcttctcctctgggtttgcagacagtggctttttgccatgtcctcagatggcctttctatgcacatgcacagagagagagagagcgcatgcacacgctggcacttcttccttttcttataaggacaccagccccatcagatcagggacctactcataggagctcatttaaccttaattacttcattaaagatcctgtctccaaatataatcacattgagggttagggctttgatatatgaatttggggtagacacaattcagtccataaaggaagtatatctctcacacatagctcacacaaattctgtagaaaactatcatctatttacctagcatctggtgattttaatcactgcttttgacttgcatagtgatagataacatagggttctagaatagtaacaggtataaaaaatacctaaaccaaagtatccacctcacagaactcgaatgtaattaaatattgcttaagcaaatattaattttcctttattctttgaagacaaaccagtggtgagctggagcttactatctaagctcataagagtccattttaaaatttttcagggattttgtgacctggttattcaacacaaccattactacaaattaaattatataaactttcaatgaaataaatttattcaaaacaaatgtaacaaatactcataactcatcatttaccaattttttcctagagctttgttgaagcactttttaaattttttttaagacagggtctcactgtgtttcctggctggaatgcagtgaagcgatcatggctcactgcagcctcaatttcccgaggtcagttcaatggatcctcccacatcagcttcccacgtagctgagaatacaggcttaccaccacacttggctgatttttttttatttttagttttgtagaggtggagttttgccatgttgcccaggctgatcttaaactcctgagctcaaagcgatcgtcccgcctcagcctcccaaagtgctcggattacaggcatgagccaccatgcccggctcacttacaaataatttaatacctctcactattgccggtgctctcactattgctggtgctctctaggtactttgcatctttacatctactacgcaccatcggtagtggtggctctgacagtctgctactgtacacctcctcccaacgccttattcaaggtcacgactttgttactttgagactggctctgggcaagtatttacaccattgaaaatcaacaatctctaaaactgggccctttcattttccaggagagccgtatattaatcatttaccggcataccactggcacaaaccttaccctctttcatggtacagggttttcccagtatttatctggagttcctgttgcagctttccatggttgaaacattattacccatcctttaaaaacaaaatgaaactttttactgaaataaattaccttctttaaagcttttttttctgtttcctccattagacagagcctgtactgctctgttgatctatgaactttcaggccctcagtataaaatgttttaaggacaacagaaaagtcccctaaaacttacacctagcattgacaacatttttctagccccctcagcaatgtcttctacctaaaattgcctcagctgtaacgtaacatacctcctgctgctagtactagctcacagctaatactaagcgtaacacctgactccattttacaggggccactttttttcctctaaaagttttatgtagcagtaagtgaaatagaatagatgctggggtaaacagcagtttccagattaaatgttattttctgtaggaaacatttctctccaatgttgccccttcacaccatccccaaacaagtaaaaagttgctcagactttgaaaatgtaataccatctggcagaactcacattcgaccttttattaaaactacaattatgtcacacctgtgaggtttaaaattcaaggctccggaagttaaagcgatgtgtccaaggttacatggaaaattcttgagagctcacagtttcctgccctggcctttcacttcggatgtacaccatagtacgtgtgttttctgattagagctctcttcagttatgatttattttaccatcataacattttgggaggctggtatgagggagagtatagaagaaggaattcaagcagaaaaggttaaatgatttacagttttcgccctttctccaagggaaatttatgtgcccccaaattttagaatcatgaatttagattgaatgagaatggataaaatccatttacagtcaatttagattgcataagaatggatgaaatccttggcatatctaaagaatggaaaagggatcccaggaggtagttctggataacttttaacttgaaaacgtctggtagaggccgggcatggtggctcatgcttataatcccagcactttgggagggcgagtcaggcagatgacttgagcccaagagtttgagaccagcctgggcaacatggcaaaaccctatctctacaaaaaatacaaaaattagctagctgtggtggtgcatgcttgtagtcccagctacttggggggctgagagatgggaggattgcttgaacctgcgaggtcaaggccgcagtgagccaagatcgcactactgcactctggcctctggcctggacaacagattgagaccctgtctcaaaaataaataaataaatagtctggaaggatagaaaaagcaagtgagaaacaaaaaagggaccacctatgaggtaggaggaaaaccaagagtgtcaaacaaacccagaggaaaagcagtgcatgagtatgaagggcatgttccccagtgtctaaagttggtgaatgctacaggagagtcttctttggttttagtatccaggaggtcattattggccttgatcttaatgaggaatcagccaaaaggtggggaagggaaccaggtaagagtggattaaacaggagaccaggaacaggagacagcttatctaacactcatttggaggtttagactcgaagggaagcagggatctggtctagtaatggaggaaataggagggaaaatccatttgagaagagattaatgaatccttctaattcatggttcggtctagtttatcatgaaacactaaatcaaatgaaagagttgcttctatagccctgtgcacttccatcagcagattttatattgagttgtgcagatcaaccccattgccaaggaagaacaagaaaaagatatttcacctacattaatggttggcagagtggtttttccctctgataaattaatattcaatggaggaacaatatgttaatgagtatacagcatatattattcagaacaataacaataaaggatttctgtagaccttgtttaaatgttaggttttcttttgctgttgagtacatgaacagcaatacttacacaacttacatcatgatcgtcagagccgatacagaaagccacaggcctgcctggctgctacactgaggtgtctacagaccaagaggcttcacatgtgcctttctgtaattagtatttactcagcctcctatagcagggaaaatattttgcacataataaactcatatatttccttacccattaaggggtaatgtacttaagcacattttcctgtaggatttttaccagcaaggtcgagtcatagctccaggagaggaaagaatgggactcactagaagagaagatcctcattagcaagtgaaaaattttgtaaaacagggattacaagagaggaaggtatttttttttcaaatttttcaaattcctttaacttcttctaacatggaagtcagatctggggggctagagccttgcttgctatatacccaaagatgacagaactcaggataagacatagaaaaagagaaaagcctgcccccttcttcctcaggccttggaatcgttggaagaagaaggggagagagagaatagagcaggaaatgagactttgtatgtacctctctgacttctaccctccaggcgaaaatccggaagattctggagcaggctcatgacacctcatatcttgtgtgtcttagaagggacacgaaagctcttgcatgtcctggtgatgggaaatggtggtgtgagcgggggctggtgtgagcgggggctggtgtgagcgggggctggtgaaagctgggacaagacaaagaggctccctctggtgttgacttcataactgaagtccgctggactcaagtaatgagtggacttggccagactctaccggggcatctcgccccaaatggccagcagtcttgtgtccatggagaaatctagaccaaccatttcacagcacagacctatgaggatgcagagagcagcctggcaggtctaagtctgtgcctttctcccccttggaagacacactgatttcctgaatagatttacccaccatttgggagagctgaaaatgggaaggacaactttacaagcttcaactttacccaaagagactgactcatgcaaaaaaacgtgtaaaaccaatcctatggggagtgaaatgttgaagaaaccataaggaaattgtctatttcctttaacagttagaaggactagggcagcttcccttcctgtcatgggaagtgtggctcctacgccctctgggagagtggtttgagaagtgtttccgctgtgacttaaattatagccatttcccgagcaggcagcccagggactgtggtaggcagtgccagctactcggagtcaattgaaagggaattggtcgcctgggaggtttctaacctgatttcaggtttcctggacaccgcgtcctctcctgacccaacacctgctgtgacagatagatgtttgtaatgaggtgaataacaaacagtctcatgaacattaggtcacatggaacaaaaggcacactggcttaggtggagcctgcattttcctgtttttctaatacatttctctaccaagtctactcactcgcggaaagctttggcaagatttttaggcaaagcctttaaactcacatttttttgaagaaaaaaatgtttgctatttcatggctgaaagagagactcaattctgctgttacattcagaaatctgtttttttgtttttaaatgtctgtttcatacttaaaatctcagaatatcttactgagaccagctctaaagtaaactatttcaccacactcaaagaagacccaaccatcataataaaaggggcagaaagaaacattgggaggtgatggatttgttgtaaaaatgaatgagggccaggcacggtggctcacacctataatcccagcactttgggagcctgaagtgggaggatcacttgagccaaggaaatcgaaatcagcctgggcaagatagtgagaccctatctctaaaaaaattttaaaaaattagctgggcatggtaacacatgcctgtagtcccagctactgaggaggctgaggcgggaggatcacttgagcccaggaattgcaggctgcagtgaattatgatcacaccactgcacagccagggcaacagagcaagattctgttttaaataaataaataaatattaatgaataaaatcaaatattcctaatagacaaactggcttttgacttttctggtggtatttcaattgatttttcctgtagcggaattcataggtgaatgcctgccacagcaagggtccagtgtgaatgaagctttctatgtgatttgtaggtttttcctctgccctgatgtgactaccagaagtggggttcagctgggagttttagaaatgactttttctttttatttaaattttgtgcctaattatattcttagatgtattggtcagagctttatcatgatcattcgtatatctacagtccctcagtatttaagtcttattagcaaaagtaaatgtgaaaaaggtattgtgtgagattttacaacagcccaagatgaagagtatagatgtgtgtggtgtttgtcgatggcattatgcttctatccttgttctgacaggattctggccttttggaacattctgtctaaggattgaagctaatttagttgagaaacctaaatattacatttcgagaatgaatttaacacctagatttccaatcttgaaattacaatagtcactcacttatcaaagagtagagtagaaaatagttctttccttttaacatcttttctctcttaaaattggaggacagggatttataagtagtgttccatctatccatccatccatttatccatccatccatccattctttcatccacctatccacctatggtatgtacttgcatgtgtgtgtgtgtgtgtgtgtgtgtgtgtgtgtgtaaacatatttaaaaggcaggtttactcattgcttttggtacagttctctaaactaaagaagcttatgttggtacttttattgtccatgaaattatattatgaaacaataacaggtaggaaggatgggttcccataaatatcctcttactctctttgcattttgtatcatgtgcactactaatctcttacatttgttaatccattgctatggttttgacataagttggactgacaccttcatttagcaggtgtagaaagaggcccagagaggtccacttacaggcaggagtagggccaggccagaaatctagtctcccgtctttttgcttttcttagcaaacagattccccaatgagcagacttgattgtgtcttgctgcacagcaatccacactaaccatacaggtgtaatgtccattatctaaaaaccccagtccgctttgatttcggatcatgtgcttcccttctctactgtgcagatgtcaggtaaacaggtcatcgctgcactgcttcattgtttgttccagtcttcttttctctgggttccttcctttattcattttcagctgttatgaatttatacacaattaaagggggagggaggcatattaattgaaaaattgatgacataaccttgagggctttgctttaattacctccagtgtccaggaatgacagttcttcagatttatcttctcttccttaatagaggattttcccactggacagacttctggcaatatctggtgttcagactgtagtgccatgctctgctatttttattactcacacaaaagtgcgttgatgggccatgggcaagttaaatttatcatcttgcaacggtgggatgaaagagccattgctaaccctggcaaacctaaggtgtacaatttcacaaaattacatagatggtaagaggtggtgttgacacaattggagctgacactttcatttagccgacgtggaaagaggcccaagaggtccacttacaggcagtggtagggccaggtcagaagtctaatcttcagcctccttgctttgtactcccgacctcaaacccgaccactctcttctcccaaccataatgcatcttagtgagttacagtacaacacaagatctagaaatatctgactattaaaaaattatctgctgatcataaaacaattgaaaacatagagaagaatttagttaggggctagatgtagtgtttaaaatttgaaaatcaatagttttcctctatagcatcaataatatctatctgtctatctaattatgtataatatgaaacaaaacaacagaaaccataagatatattaatagaacacatataacctgtttatagatattcctaaggaggattgtggcaaagattcctggaagtgatatttaatggtatcttataaaatggtagtgaagagaaaagtaaaacagtggcaaagaatatgaaagatgagataccagtgtataagagagcaataaataattaaaagcaaacaaatgggaaggaactgatctttcagaaaaaaccaggagatacagctaagtgcccagagcacaggatcccatctgagagggacactggaaagagaaaaccaagggaggtaaattatcaaagaaatattataagaaacattttcacaactgaagaatattaattaccagactgaagggccaaactgagtgcccagccacaagaaagaaatgacccacacttaggctccaaactggaaaattttggaataccaaaaacaaaaagaatttttttcaacatttccagaacaaaaactaccactcacaaattgaaagtcagaatgagatcaggcatctctacagaaaatgaaagtttgaagagtaaagcaaagcattcaaagtcctaaaataatttaatggggaattctgaagccatactatcaagccagagaatagaacaaaaacatgttcagacatacaaaatactgtaccatctatatatttttctaaaaggcaaaacaaattctgttctttctataagcatatatatgaatatgaatgaacagagaatttctggacatctacataccaaacttaaaccatggtttacctgggggaggggactgggattagggaggtggccaaagggtgctttgcagctatccatattgtttgtttgcatgtgtttactgaaataatgtaattatgtattatctgggtgattaaaagtattcttcatgttaatgcaagataatccattagtgataaaagttagttttaaatgagagcttgtttgaaattctaagctttcctctaactgttcatctggaaccacttctttcaagtgccctttctatttctagctttaaaaagaaatccaattcaggctaaaaggagccattatagtttcttgatatcatcacatttctgttaatgagcccttcaaacttgattggttcttagtagaattacagtgattctgaagcaatcctgaagtcacctgtttccctctgccatagaaaatgccgcatctgttgctgatataatctaagataacaaaatatcaagaaaacaaaacagagagacctgagcttccaatgaaaactctgtataactttttaaaatatgtttaaatgcatcaatgaatgggaaaaaagtagagaacgctcagaggacaaggtccaagtgaaagcaggtaccagagaggtgagcagagcatgcaagctgtcctttatcttgaaggtgtctatcagtgtcagcttggtagaacttggtattgaaacttggtgtagaatagaggaggaaaaaattctccctgagaattcatgattgcaagctggtcctcactggggggtttgaagcctgaattcaccccacctgacaaactcagggccagactgaagggccaaactgagtgctcagcaacaagaaagaaatgacccacgcttaggctccaaactggaaaatttcagaataccaaaaaacaaagagatttaatttaaatctgtctcatcctggaaatcctctgggctcctgacataattaatcagtttgtttaaaaaggaacccatctttaaaccagaccttaaactattactacagataaagttccaggaaattcaccacatgaaagcaatcacaatgaatacgaagaaagtccatgagtgagaaagagcaaaaataacagacagcagaatgacccctacaaaaacttgagattttggaattatgagaaacagaatattaagcaagtacttttaaggttgacaatatgagtaaaaagcaactgactaaaaaaagcgatgaagcacatttgcaaacaaacaaattgattctctataagtgaaaaatatatttaaaatgcaatgcatagttatagcaacagaaagagaattagtaaatttttagtgatctatataattagcaagaatacagcaaagtatcaaagacatggaaaatatggtagagagatcaagaggcacgaaggatagaatgagaagaggtgagagcaaataggtacaggagattatctgaagaggttatgtttcagaattaataaaattaattctggattaattcatagattcacaaattcatagattaagaaatctcaagcatagtgtattttaaacaatgccacatctaaatataagtatcatatttaagttccagaaacacaagtatcatttaacaatgaaagtaataaagagatttttagcacagcccaggaagacaaaagatggggagcaaggatacagtgaggactgagggtttcccaccagcaaatcttcactaaaggaaatcatatctccatatgctagtcagacaaaaagatgcccactattatccctttctgttcaatgcagtaagacaagaagaataaataaaagatacaatgttcagatattaaatgaaaaaatatttgcaaatgatgtgaataactattcagaataatctacagataagttaatgagttagcaaatatgctgaatataaaattaatttataaaaatccatttcatttccatatataagcaacaggcagctagaataacttaaaaaatatataacatcataacaagtaaagttattattgggtataacatcaaacaaggtctattataacatgcttatgaattggaagagccaatagcataaaaataagttctggccaacatggtgaaaccccgtctctactaaaaatacaaaaattagctgggtgtggtggcatgtgcttgtaatcccagctacttgggaggctgaggcagtagaatcgcttgaacccaggaggcggaggctgcagtgagccaagattgtgccactgcactctccagcctgggtgacagagggagactcagtctcaaaaaaaaaaaaaaaaaagttctcccaaattgatctatagattaaatgcagtaccaaaaaaagtcaacatttgtagaatttgacaagctgattccaaaatttttatggtaaagcaatggcccaggaattaccaagatgtttctgaagtgggacagaacataaagattcatcacatatcaaaaatcattctgaatatgtagtaattaagatattagtgggatactggcagctttaacattggcacaaataagtgatctatgaataagcgcacactgatgtgagaacttgatttatgagagagatggcactggagacatgtggagaaactcaggcttttcaataaacattgaaagaactattattattgatatggaaaaaaactaaattggattcctacctcacctcacacacaaaaatcctatctatgtggtttcaagaattaaatatgaaatataaaactataaatctttagaatattatgtagaatacctttgtgcatttgggaaaaggaaggtttttctttaccaatatagaaaaagaacaaaatttaacagaaagattgataatttgggctaaattgaaggtaagatattctgttcatcaaaagacactttgaagagagtaaaaagacagataactcctacacttaaaacttaatcaaaaattagtgttatacatcatcctttgctaaccatgagggatttgttctaggacccaccccgcccagataccaaaacctgcagatgctgagcacctgacacaaaatggtgtagatagtctcaaattgatttccagagggtttgcaccaatttttacttccaccaacagtttacagttgtcccagatgcaccatatccttgaaaattacttaatatcattagacttaaaaataaaaagtagcaaaacatgaatccctggtttagttggttaaataatggtccctcatattcctaaacacttcctcagatatgccagtgtagaggtataaaatagtgtaacactgtggtttatttatatgtattataaatatatattatatatagtaaaacctattcatcctcctatatatattaaatcctctccagattacttatactacctaaaatgccatataaatacttgttacactgtattggttataatttgtattatgttttatttatgtttttttttttcaaaattttttgagttacaattgggtgaataggtggatacgaattcaaccagcagatacagagaacccatggatacagagtcaactgtattatatagtattatatatactctatattatagtaatatattataacatagtattatattattatatatgaaattcctacagattaagtgaaagacaaacagtagaaaaatgtggaaaaactcaaacaggtgcttctaatatggaaaaacacaaacgattggcaacatataaataggctcaagctcattagtaatcaaagaaatgcacattgaaaccacagtgttatattattttatgccttcagacaggcaaattttttaagtctaacaatatcaagtgatttgcaaggatatggtgcatctgggacaactgtaaactgcaggtgggagtaaaaactggtgcaaacactctgaaaaacaatttgagattatctagttaagttgaaggtgtacagtcctataaccagaaattcctcatcaaggtagaaactccctagagaaattgtagcatatgtgtatcaggagcgttgtgccagagtgttcatagcaacactctctgtactagaaaaagaaatgaaaaataacccacctataatagtagaataaagcaatgttaatatattcctacaaaagaatattacacaacaactaaataaatatgacttgtagctacacataacaacttggataaatttcatcatcaaaatatttagttaaaaaaacaagtgggaggaaaatatatacagtatgattcaatccaataagtttaaaagcatgcaaaatgaatcaatattttagtatacaaatatgataccaatcaattttttaaagtatgagaacaataaaaccaaaaaattcaagactctcattacctctgaggagtcagggaaggagagaggattttataaactagtcagtaggtgtttatgcttcaatgttctttatatcttatgactattttaccctcttttatatgtactcaatattgaagagatcaaagctatcttgagtagaggtaaaagaaaaatttttttagttaaaaaatatatttaaggccgggtgcggtggctcatgcctgtaaacccagcactttgggaggctgaggtgggtggatcacgaggtcaggagttcgagaccagcctggccaaaatggtgaaaccacatctctactaaaaatataaaaattagccagacatggtggcctgcgtctgtatcccagctactcaggaggctgaggcaggagaattgcttgaacctgggaggcggaggttgtggcaagctgagatcacgcctctgcactccagcctgggcaacagagcaagattccgtctcaaaaaaaaaaaaaaaaaaatatgtatatatatatatatatatatatatatatatatttaaatgacacttttaaaaatggagggaggagagtagttatgatatatcagtttactgtaagaataattttgacagatgggatattttcgcatgtcagcatcattcaaattttttattatgttaaactgattaacagtaattacatataaaaagtggacattcaagtcattcagataaagccactaccccgctctgtgggtttgtcagaaggtgtcaagtcctaccttctcagtaggcgtctacacagcctggcgctgtatccctctccacccgccccctcgcagtgtacactatacttccactgttccagctctttgtctgtccccagatggaaccatgcttctcctgtttctgctgctaggccacaattcctccagatatctccacactggtacctttttctgcagttcttggttcaaatgtttctttgcagagagactttctcaaatggcagagtagtttctatcttttttccttttttttttcttttaatgtgtggcaccatcattctgaaaatatcttattcttgtgattacttgtttataacttgtttcgtccccacacaggggccgcgtctctgttatttctccaagcacctggcatagaggagatattcaacaactttatagaatgagttaatattttgcagactaaatagttgggcaatagaaggttgcatatatattcttattttttaaattggggaaacagtaaagttcagacccattcactttaaatattcatccaaaagatatttattaagcatttagtatgtgtcaggcactgcgctgcatactaaggatacagagtgaacaggaaggtagccaggaaccctgtgctgggaatggacaggcctccaggtgcctaagaagatcagagtaaaatcaggaaccaaatgatctggaagctaagttgccaaaatactgtgggtaggattctgggcatttttcttcaataattctatagtgatacctaaagccagtgtggagattaaaggatgagactatcagaggtaaggggagctttaggacacaaagctagtcattgcaccaatgccagagtttccacgagaaagaaaaactaaaaagcagcaaaacacaagtccctggattagttggttaaacaatagtccctcatcttcctaaacgcttcctcagatatgtcattgaaaaccccagctgggaagacccctctgagttccaagactgactaatgaaatgatatttctacctttgatctgttgcaataaaattaagatgtgagtagaagagaacagagatatctctataaagttccctgttacagctcagtcagccctttgtatccatgggttccacatccatggactcaaccaactgcagatcagaaatatttgggggaaaaaacggtgtctgtactgaacgtgtatagatttttgtccttgtcgttattccctaaatcattgagttaggtattatcattattccctaaatttacattgagttaggtattataactagcctagagatgattcacagtgtataagtggatgtgcaacgggcatatgcaaatactacaccccttttttgttttttgttttttgagacagagtcttgctctgtcacccgggctggagtacagtgacgcaatctaggctcactgcagtcttcgcctcctgtgttccagtgattctcctgcctcagcctccctggtagctgagattacaggcatgcgccactgcgcccagctaattttcgtgtttttagtacagatggggtttcaccatgttggccaggctagtctgaaactcctgacctcaggtgatctgcctgcctcagcctcccaaagtgctaggattacaggcctgagccatcatgccccgccagagccaccacccctgcctgcaccactttaaataaggaacttgtgcatccgtggattttggcatccaaagagggtcctggaaccaatcccccatggatgcctagggacaactgtattatattaggttgctaatcaattcgtgtacactttacccagttttataccatattgaactattgatatttgatttgacatacctgtggccatttttgaacaaggccattctgaactaatatgtcttgatgtgagagcatattccctagtggcatctttgtttctatggaatgctctgattcaatttatatccctttgatttatatcctgtttccatcagggaacaagctctcagcactaacgccttctacacaggaatgcctctaccatctctttcagatagttcagaaggcccttgaagatcttacacattctaaataccctgggacactttccaccatatcacaaggtcattacaattgtctgccagtgataattttgttccttaggttccttaacatttactcctggttctcggtgggtttgtcagcatctcacagggttggcaatgacacccactatacttctctctatcccgccttggggaatcagtttaacatcttatctccttgcttgttggaattgacacatccagcattcagactgtccatgctacatgtaggataaccaacaaacaaaattgcgttttttgaaacttaaaagctcaatacctttatttactattagactgcagattgttgggcctgtaagtaggacacacattgcctagagtggtccggctctgtcctttgccatctggctgcatgaatcaatgtcagctggatacaaatatatctctggaaaggggacattgggaaaaagggtggatacactaagcatagaccccagaacctgttctcagaaaaatattttcatggtaaatcctgagatattaaaggacaggtttaaaatgctggctgcatgctttctctgtcttttattttcattggatgctagaatttgaatgggccctgtttctgctttattaatccatattttgtggcaggagaaattcaggagaactcaggaatggcaggaagtggatgagaaagagtgtgtgatagaaactgcaagtagccttaagggcaaaacaagaataatgctactgagatgatgaggcttgcatatccagctggctactgtattctggccaccagaattggatttcagcttggattttcgaggcttagcagtacaatgaggactgggattcataaattataattataagtgttatttattaaaaggtagttttggtctcagaaggaaccaaataataataatgcatgcatcactgaaagataaaaatccataaaaaataattggggaatatgagataaggggaaaattgagaataagaataaaaaggtaacttggagtaagggaggaaaaattagtaagccaatcataacacacaccccataacatcctggatattggttgatgtctggatattgagttcatgggtcaacactggccacagaggtgaagcatcattggagtagcttgggcttgcaaggaaggttggcattatatctcttcccatccccagatgccaccatagactcacctacactatccccaggtcctcattgtactcattttattcattcacacgttttttgaatgtattcaatatgccagtgaccaagttctggagaaaccatactttgtaaaaagtagacattgtccctgctccagtgaaatttacccccccaaaaaaggagagaaggaaccaataaacaaatgatctcctgaactaattgtctagctacaaacccagacaagttatctgaaagaaaggagcatggtgccaggaaaacccagactggtctgagcaaggtaggtataggggatcgaagatcaggcagaacatcttggagcaagtgatatttgaactaagagccaaaggctgagtaggaattaactaggtaaatggtataaggtctggtagagtgagaaagagtgtgtggatgaagagaaaccctttcagatacggagaataatacacgcaaagtccctgtgataggagggaccatggtgtgtgcaaggaactgaagagtcatggtagatagaccacagagcatcaggaaaagaatatacaatggagccagaaaggtagacagaaatgaaacccataaagccttggctgctgcattaacaattttggcttttatcctaataagacttaaggctggctgaaggtagtgatatgatcagatttagactttgaaaatatttttattgattaatgtggggagcaaattaaagggtagaaggggcaagcgggttgcaaaagattagctagggatattatgttagtgcaggcaagagactctggcagtgtggagtcggtttatgacagtggtgatggacagaggtagaaggatgtgagaaacagggcctggagccggattggctgtaggatacagggaaagggaggagtcaaggaattgcctagacatgtggtttgtgcaactgagtggattttgactcccattcctgggctaggtgtcaaactgccaaactgggaatgagggggagggagccatgacagcaacgttggacatagtatgactgagatgttttcaggcatctagagaagtcatgtggatggtgaaatgtaccactttggaattgagaagagaagtcttagctggagataaaagatttgtgagtcatacataaaatggaaggaaagtggagagaatatagcatgacaaagaaaagaaggcctcaccaggcgcagcagctcacatctgtaatcccagcactttgggaggccgaggcgggtggatcacgaggtcaggagatcgagaccatcctggctaacatggtgaaaccccgtctctactaaaaatataaaaaattaggtgggcgtggtggcaggcgcctgtagtcccagctactcgagaggctgaggcaggagaatggcatgaacccgggaggcagagcttgcagtgagcaggagatcgcgccactgccctccagcctgggcgacagagcgagactccgtctcaaaaaaaaaaaaaaaagaaaagaaaagaaggcctcagatggagccatggagagttttcaaggagcaactaggcctaggattattctaaactcagcactaggattgtaagggcaagtgtttattttctcaccattaacttaaacttcttctctattgttttgtgttacccatgacagaaaactctcactcatctctcactctagaatttcctcagttaaccctaaatcatctttgccaatgatgatagaagtttcactctaaatgggtttaatcaagatgaaaaatataatcgcatcattttataatgaataagacttcacaggtatgctaaatggttgttaccaaagtcatttaaataatagtgattttatgcgtctgtgtttcagtggttggcttctctggccttgacctgtgagctcagcatgaagtgctgagatttgatttaagatgacctagagtttatgtactgtcatttacttggaaattatcactttgcgtatttcagatgacatctcttaggtcagttttgcaagttcattatttcaagctgtctaaaggaggtataggattttgtaacaagtaattaaggaaaccaccataaaagtttaagtttatactatatgatagttttcattatccaatgctgcattttttgtaatagacattgaataggagggaactatccttactaagtggtaggcatttttccccatgattatttgttcactgaatttggaagtgatggaattccaatgaagagctatatcaggatcatatgcacatgtgcagtataggtatttgcatttgctatgtgtgtttccctgtgttcgcgatgtaatatataaaatcaagacatcaactgttgtctccccagagttatggctatataacttaagcagcaaaggaaaggatttaggggtccattttaatgtaggcaagagataagaccattttttcaagttaataggaaagaaaattatggagctgtactgtccaaggtggtaaacactagccatacagggctatttaaatataaattattgaaaaattgaataaaatttaaaattcagtttctcagtcacactagcacatttcatgtgctcagtgttcccatgtagctagtggctgtggtattggacagtgccaatatgcaacttttccacaattatggacagttctattgaatagtgccaaacaagaacagggttcaaatccaggccagtgcctctgtttgcacagccagtgcactaagaatgattttgacattttgaacggattgaaaaataatcaaatgaagaagaatattttagagcacatgaaaatcatttgagattcaaattctagtgtcctcaaaatttctattgagcacagccatgtgcattctgttatgcattgtctatgtgttcacactacaacagctgcattgagtagttgtgacagagactttatagtctgcaaagtctaaaatatgtactccctggctctttaagaaaagtttgttaactcttgagctaaagggaggaaaggagtagtatcacacattaccgtcataaaaaatattctgtatagatttggaaaatgaagtcaataaggagaagggaaagtgtatctagaattcatgcccagatttgatggctgtgggatatcctgcattggggggtgtgatggtggatgggttgaaagctctggaaacgttggcaatagcctttaacatgtatccaaaggctccatcaaaccctcagctttctcagtgtctttgcaggttttttaggatactctcaaaagctcacttctctctgtaattcaccatcttccccattgtaaaaggcaaattaagtcctctcaaaagtttgacaatatgaaacaaggaaattcagttagtctcttgacagcaatgccaattatcttccttttttttaaacattctcttaggcgaatgcctaagacaatggaaaattattttgcagtgagacccaagccaatccagacacaagctgctctcattacaaccatctcttctcatctcttgaggatgagctcactaataagagtacattatctcttattgggacaggcttaaatacatgcaagaacttcattaagtcattctctatcagaataggagctattgagaatttctgcagaactaggattgtgtcttctctacctatgaaatgagtggtgtcatgacaaagcactctagggagccctgccaacctatttgataatgttgatggacaagattgtatggggagtggggagaaaaaacaccttttatattcttccctgatgtatgtataagtagttctttaggaagagatgaaatgcgtggctttgtcctgaatagattcccttaggggacacccagggaattcctaggcccagtggaattaatgttctagaaagagaatcatgcttctgttgcagagcccccttcttaatcctcatgaatcctagttaataacacatataataaagtattcttattgatgcctgtaacttcctttgaaatgcacccaaaaggataaatgatatagacatatgctaaagcaagtatggtgaaatgctacgggtggaatctatgtggtaggtatatgggtgtccactgtaaaatgatttcaactcttctatatgtgaaaagattttcataacaaaatgttagggaaaaaatcctcctggaatacatttcatgtaagcctctaattcctcagcattagccacaagcagaactgtcttcaaaggagtaaatcatcaggaaaagtccgtgaccccaaaagagtgctgtccaggttttctcaggcatggctcaggttcaggcacaaatgcaagttcccagttcccatctcctcagtgtgtgcccgctgacctccctgcaacagttctgcccattgaccagtaggggataattcagatgaacaccttcgtgcttggaatatgagcacttagacttctagattttaaaaggatttctgagcccgatctttacacacatgctttagtttgtactgtctttctgtacatcctcagttaagagatgctttctggagtgttttgtagatggatttgaagacttctcactgcttcagtacagaatgccctggcaatgcacgcctggaaggagtccatggactgatattttctagccaaagggagctaaaaatcagccattttgacatttggatttttcattgatgtgtcttgtttatttaattcaatttaatatgaaagagtagagagggtagaacaaactgttcagcaacgtatagatcattaggttttaaaaccaaataaaaagtactcagtgtaaaaatttgcctgactgaaaggattttgaaattattcttgaaagctctgaagcacgcagaggcagctttggatgtgatggatatttttgctgcatagagtatccagtgccaaagagatgattctgtcagaaaatattacgaagccaacctagctttgataattgcttcagattgtctacatatataatcctaaatctcttttcaaagtacttacactaccagtggtctttgatttataactgctggtccaagagatggcctactaataatataaaacagggtcttagcttcactgcgtatcgtttccagaggatgtgaatcttaagtcaatataagagatgtgtgagtaggaatgagaactcttagaaatcataggaaggggttcaagtcacagggaacagcagatgtagctggcctaaggcaaagggaacagtgcaggatcagaaagaagtccattccaatgaaaagagctgagaccaagggaaaccataatggggccagagcatgcaagaccattgcaagaagcatcaagggcttggagctttatccagaagacaggagcagccattgagagggcatgctccagcttttgttttagcagaatctctttgcatgtgatgtggaaaatgaattggagaggggaaccaggaaacctgttaggaggctacttctgtaatccatgaaatggcaatattctgcttttatgtccctgagaagaaagcataggtaaggaccactgaatacacatttggtagaaaaagaatattccccggctaaggattgggaagataaaacaatcaggaccacccacccattacttcattttcctttatgtatccgatcaagtaccctttctaaaagaaggtaaactttacagttttttttttaatttaagcatctcattagaacctactgaatatgagtctccatgtactaattgtagtaaaatctctctgaaggctggcatcagtatgtctgggcaggatgtatattctagcccagattttgcatagatgtcacaaggagtccagaatcccttgattttcagacatagccattagaagcacactgatcttcacaggtggaggcctccactgccatcagtctattactgctgcttaaattcacagcaccgtggacaagaggagaaggtagcctagctgtttcattggcccccgcatctctctgccacatgatggacagccatatcagattgcattagaatgttgactgcatgttaactggtgatccttcttcctctcaatacttattttaaaatcactctaaacgccctgctcttattactaattagattatttggccttggtgtatagtgtcttggggtcatcagtatgaaggtcaagtcacgcaaaaagagtggagtctccaatgtggatacacccaggaggtcactctctccccaggctgtgtccaagtagcataggggagcacagggctctgtccccatgatgtactgtccttttccatgacattggagatgaagctggacctcaactctgcacatgcatattcctacaacttctcagagtcctgtggataatgacggaggagagaaaccatgcaggaaacagccccctagagcacccaatctggatctaagtttgtcttacatgtttaagaaaaatttgctttaatttattttactgtattaattgattaatttttaaagaaatagtggagtccatcactaagacctcaggccataccttagatattgagatgttgaataaatcccaccagtttattttattgtaatgtgcctcatttttcctaaaaactaaaccccaaaatataaaagttttcgttgttacttatttatttattttagagacaaactctcactctgtcacccagcctggagtgcagtagtacagttgtagctcaccatagcctgaaactcctgggctcaagcgatcctcccacctcagcctcccaagtagctgggactacaggcacataccaccatgcccagctagttatttatattttgctaaatgaatttttgaaataaatttcacagatatttccccattttcagttgaaatttaattttctttctttctttctctttctttctccctctctttctttctttctttctttctttctttctttctttctttctttctttctttctttctttctttctttccttctttctttctgtgcttctttctttctttcgtattgctccttgtgtagcagggctatcccataggcagggtgcccagggtagtgaaagtttaattttcagagtttttaatgccagaatccgacttatgaattcactcagtagatattacatgtcactggcatatgaccttttaatagatattttattggcctaggaatggtaaggtcagagacttgagtggttccacttctaacagcaaaaagaaactatttctggctataataaaatttagcatcttaaaatttaaatagaatagttgtttatacttactcagggaactggagggttatatgggatatttaaataaattgtggaacacttggtcctgaaaactgcccattataatactttaaactaattaaatttcatttaaaagtttcaagcttcctgaacatcagggaaacgtgaaaatacagtcatgggttatagagactagcatcaggaaaaacagccagaaattctgaacttggatctcttcgcatgtccttgttctgcttaagaaattgcttaagagatgaccttgataacattttaaaaatttgagtgcgaagtgcaatgtattgcctttccatggattagagcacatgataactcttgagccagattataggaatccctatcataagattaggagaagtgagagaaaagaatcagaatcgaaagcctggcccacaggtgactcccttgtctaaagaaaacgcttggtcttgctttcagcacatggcttcctgaaaacgaactttaccttaataagtaactgtttaaaactttacttattaatttgaattagtttgagtccttagggaaccctgcgagggtttagttgtcttgattacaaaggcccacatccctcagaaagtaccctcatgtcggcagctggacaaccttaaggattgtcattgtggaatcacggcacaatccaatttcttatctcactgttatgagttgagtggtggtcaccaaaaagacatgtccttatcctgtttcctggaacctgtgaatgttcccttgtttggaaaagagatatttaaagatgttataaaggtaaggattttgcaatgaggagattatcttgggtcttccatgtgggccctaaatccaatgatgtgtgtattagtctgttctcatgctgccaataaagacatcccagagactgggtaatttataaagaaaaagaggtttaatggactcatagttccacatggctggggaggtctcacaatcatggcggaaggcaaaggaagagcaaaggcatgtcttacatgacgacaggcaaaagagcatgtgcaggggaactgtcctttataaaaccatcagatctcatgagacttattcactatcatgagaacagcacaggaaaaacccacctccatgattcaattacctcccactgggtccctcccattactcatggggattatgggatctacaattcaaaatgagatttgggtagagacacagccaaaccatatcgatgtatgtccttaaaagagtgaggcagggagagatttcacacagaaagaagaggaggaggaggcaatgtgtccacagaggcagagattggagtggtgcaggctcaggtcaaggaatggtgacagctactaggaagtgaatgaagcaaggaactgattcccccaaaggagtgtggccctgctgacatgttgatttcagatttctggcctccagaactgtgaaagaatacatttctattgttttaagccactcaatttttggtaagtcaatatagccgctgtaaaaaactaatacgctaacaacgaattctgtttcctccatttattcataccttccctaatgtctgcttttccaggtgaagtatctgaaaggtctttttcccttccatgctcttgcccatccttctggaatattctctgtggcagttatgcagacctttacaaccacatttcttgtgggttgtatgtgtgaaatcttcagagctcagaaaaaaaaaatctgatcaaaagcaacatttgaactactgaatttctttcttttcaagttcattcattcaatattatttgttgaataaatattcagcaaatatttattgagcatgtactatgtgccaggcattgttctgcatgctggagaagcctggggaagtgaggggaaagatgaacaaaaatccctgctcccattaagttttcataggcaagcaatacataaaataaagaggtaaagttatagcatgttggatgtagtaaaaagaaactacagagaattaagaaagaaagagggatagggaatagttttctggtttaataggatgattatggaagacttcaccgagaaggtgacctccagaaaggagatatatcagtcagagttcccccgagaaattgaaccaataggagatattcacccttacatatgtatgtgtatgtgtatgagatttattgcaagggaattggttcatgtgattatggaggctggcaagtccaaaatctgcagagcagatgtcccagtttgagttcaaaagccacaggctgctggtcagcacagtggctcacacctgtaatcccagcacttcaggaagccaaggcggccagatcacttgaagtcaggagttcaagactagcctggccaacatggtgaaaccccatctctattaaaaatacaaaaattagctgggtgtggtggtgcatgcctgtcatcccagctactcgggaggctgagacaggagaattgcttgaacctgggaggcagaggttgcagtgagccaagtccgcgccactgcactccagcctgggcgatagactctgcctcagaaaaaaaaaaaaaaaaaaaaaaaaaaaccacaggctgctgtagaataaaaaagaaccaatgtcttagttcagaggccatcaggcaggagaattctttcttactcaggggaatgttaacctttgttctattcagaccttcaactggttggatgaggccctcccacattagggagggtaatctgctttgctcaggctactgatttaaatgctaatctcatccaaaaacaccctcacagaaacattcagaataatgattgaccaaatatctgcgcactctgtgtcccagcaaattgacacataaaattaaccataacaggagaggagttgagtgagccataagggatctgtgggaagagtaaaatttctaggaagagtaaatttcaaaagctaagggcctggcttgttgaacaatgaggcagcaagtgcaagagggactgagagccacaagagatgagtagcagatgaattcggagtgcccttgaggtgaggctggtagcaggcttgatagaccatggacatggctttttgtctgcttttggttattttgttagacctatttcagggtctccaccgttgtcacattctttcctttttaagagtattttttttttctggttatacccatgaaaccttattttaagtccctaaccacaggctttagagatctatgctgtataaaaagtaattcatccaattctattatgacttatatatagcaatctactcatttatgaaacaaagaattccaggcatatcttgttttactagcctgtcctgagtattgtggttcgaattcatttgtggactcttgagtagggctgtctgtctataatgacaatgcatatacatgtagaaccagcttatgagagtttatgttttataaactgcataatagatttaaaagtttctccatacatatttcatgattcccacctcagagggcacaggaaatggtccaaagcagacgactctaacttaaaatgactgacaaggcatctgggtcagtgagctttggctgcataacaaaccacttcaaaacttagtgacttgaaaacaaatcactgttgagacaataaccatgttactgctcacaagtctatgggtcagctgaacctttctgctgctttgccttgggcttcattgatcccagctggtcttaggcaggtatctgtgttcagctagcagatcaactgaagtctggctagttgaggatggtcttacctacctggctggcagctgactggctggcagttgggacagcaggagtgacggggccctgtgtctctcttcttctagcaggctaatcaaagcttgctcaaaagcaggagcatagacttcttaaggcctaggcccaaaactggcatattgtcactttgaccacattttactgtccaaagcaaaccccaataactgcccagattcaagtgggaaagaagtagactttaagtgttaataggaggagctgaaaaataactgtggccattttttcaatctatacataatatgctaattaattgtatgtgttaacttgactggtccacagggtgcccattcacttggtctgagtctgatggcctgagaatgaggagagctgatggggtattacacacacacacatacactattgattctgtctctctggagaaccaagactgatacagatttttgtcccaagagtggttctagaggaagagaatttttaggatgagtttcctgaattggttctgaggtttctggcattggttctctcatctgattaggtttaacgatgctaataactctgtttccattaataaagagggcactgatagatagtccgtggtgtactctgtcaatagagatatataaatattaccattggatactcctaatcaaccacttataagaagcaaagattttggtgactgtgtatatgatgcttttgaacatgattggcaaagtaacaaatgtaaagagattggcttctattgtcatcgaacaaagaatgagctcagggtttgaattcccaggtcaaatgctgcatacatgatctcaaagctgctatgtctgccctcgaggagacctttatctcctatagccttaggactaagatcactgaaaatcaaatgcaggatctcatcctgtgactggctgaaccaacacaatttgaaccctcagcctcacaaggtgtctactgttaaagtcagtgtattaactaggaaggaatgcgttgctcaaagttggaatggagatcagcttcagccccgatgaagctgaggacattgagcccctaaattatgatgagggttctttgccagcagaagagccctctccagcctcttctaaggggattaatcctgcatcaccagaggaaactctaagggcctccctcaaggcagttgccatgcaagatgatgctgattctattcaggacccctctttgtttctagacctgtaactacattcaagtccaaagaggcccctaaaggtgacgtacaaagtgcaactcatgaggatttatgctatactccaaataagtattaagtatttaaattttctaatttataatagaaaagtttggaaaactgtgagggaatgcatattaagaacataggataatggtaggagaaacacaaattagatcaaaatgaatttattgatatggataaaggaagcagacagcatgcatttaattttgcagctcaggcatttggaaagtgctgtaatagtttgtttagtcagttggctgaaacatgggccagaaggtcacccacagtgagcaagttggaaatgctgaacttcccttggtttaatgtagagggagggattaaatgacttagagacattgggatgttagagtgggtttgtcattcaagaatgactcactcacattgggagagtcctggagacatacctttcaccataactgtgggaagtaagtttgtgagggagtcccagcatccttgaagagctctgtgacactctactctgtaggccagaacttacaatggaaactgcagtcactgaattgagaaatctaaatgtaatgggaataattggatcccagggtggcaggggccaagtggcagcactcgaccgtcaaaggcaatgtggccgtgattaccatgatgaacagtggagtcaggcagcaaccaaaattctctaactcacagagaaccatggcactggccagttgatcatggtgttcctggaaagtaaaagagataggctggtgactaaattcttttttgctctctgtaagctgaaaatttctatgtcaaataaaaaaaaaaaaaagtattacctgaatcatgaaagcatagagtcactatccttcaaggaattcccatacttgagccagtttatagacccaaaaccctttcaatgaaggggaggctgagtctctttgaggaaagactcctgtatattactgaaaatttatactgttcatctttctcccatccttctccaaatggacctatggtgttttaccaggtgactatgcattggagaaaaggaaataatcagacctgttggagactactgaccactggctctgaactgacacttattccagaaggcccagtatttcactgtggtccaccaggcagagtagggctaatggaggtcaggtgatcaacagagttttaattcaggtccatctcacagtgaagttcatgagtctctaaacttatcccgtggttattttcctagtctgaaatgtatacttggaatagataaattccctgacagaactgctatattggttcttgtgacctgtggagtgagggctattacagagggaaaggccaagtgggagccactagaactgtttcaacctaggaaattcgtaaacgaaaagcagtaccacattcctgaaggatggcagagattagtgctaccatcaagaatttcaaagtcgcagggctggtgagtctcactatactcccattcaacttacttgacatgtgcagaaaactggatgatggagagtaacatggaaagtttaaccaggtggtgactccaattgcagctgttgtaccagatgtggtttcattacttgagctattccctggtacttggtatgcagttattgatctggcaaatgcctttatttccatccttgtcaataaggctcgtgagaagcagtttgctttcagctgtcaaggccagcaatacacctacaccgtcctacataaggggcatatcaactctccagccctatgttataatttagttcacagggatcttaattggctttcatcactagtccattacatagatgacattatgctgattggacctagtgagcaagaagtagcaactactctagttttattggcaagacatttgcatgtcagagggtaggagatatatctgacaaagtttagggaccttctacctcagtgaaattcctaggagtccagtggcgtgggacatgttgagatattcttctgaagtgaaggataagatattgcatcttgcccctcctaaatcaaaaaagacggacaatgcctagtgagcttctttcaatttttggaggcaatatattgctcatttgggtgtgttactcccactcatttatttagtgacccaagaagctgctagttttgagtggaacccagaacaagagaaggttttataacaggtccaggctgctatgcaagcagctctgtcacttgggccatatgattcagcagatccagtggtgtctagatttaatattatgtgtcatgtcccaataaagcttggaagtagatcttaacaccattgccatcacccacccacacacatccctacaagtgaagaaacggaaacctcaaagcaggtaagtgactggtcacaaaaatcacaggtaataaagccaggaatcaaacattatcgcagcatgctagaaagcctatctgcttttgatttctcagtcacattattttttagtaattcttaaaaaaaaaaaaaaaaagccttggccaggtgcggtggctcacgccagcactttgggaggccgaggcaggtggatcacctcaggtcaggagtttgagaccaggctggccaacatggcaaagcccggtctctactaaaaatacaaaaattatctgggcgtggtggcacatgcctgtagtcctagctatttgggaggctgaggcaggagaatcgcttgaacccaagagatggaggttgcagtgagccaagatcgcgccactgcactccaacctgggtgacagagagaaactcnnnnnnnnnnnnnnnnnnnngtttgcattcacgtcacagagtgaacattccctttcatagagcaggtttgaaacactctttttgtagtatctggatgtggacatttggagcgctttcaggcctatggtgaaaaaggaaatatcttcccctgaaaactagacagaagcattctcagaaacttatttgtgatgtgcgccctcaactaacagtgttgaagcttggaagtagatcttaacaccattgccatcacccacccacacacatccctacaagtgaagaaacggaaacctcaaagcaggtaagtgactggtcagaaaaatcacaggtaataaagccaggaatcaaacattatcgcagcatgctagaaagcctatctgcttttgatttctcagtcacattattttttagtaattcttaaaaaaaaaaaaaaaaaacgccttggccaggtgcggtggctcacgccagcactttgggaggccgaggtaggtggatcacctcaggtcaggagtttgagaccaggctggccaacatggcaaaacccggtctctactaaaaatacaaaaattatctgggcgtggtggcacgtgcctgtagtcctagctatttgggaggctgaggcaggagaatcgcttgaacccaagagatggaggttgcagtgagccaagatcgcgccactgcactccaacctgggtgacagagagaaactctgtctcagaaaaaaaaaaaaaagcttgtgtggtggactctaacctaatcagggctgatttatatgttgtttttttctcacatattttcctcaatgttctgttcatatcacatagaatcactgagaattcttctctgacattcacagggcccctaagtactgcttcacagactgaactgaagcaatattaatgggtctcttcctagataagcccaagcctcaagcatagccctgcgcctcagtcagccaatctagaaatagggcaagcttctaaagatgaaagggcacagtctctgcttttagtaatctcactagggcaatatagccaagtggaatgaagagatgagacaagggctagactgtgtgacatgggccataggttgacagaagctccaaaaatagagtgagtgctctgaggaagctacacagtagcaagaacatggtgagctgggtggaaaacaatgagttaggtcttgcaggatgcctggcaaaggtgggacgtctgtagagggactggcttgagcaaatggtctcagaacaagctgtggattccctcttttaaagttccagactttcataacttcactttggcctgcatgctttccttttggaggcaatatcttcataaatgccataagaggaaattcaacacagaaccctccactgatttcattttctatttgaatttggcagagacccctttaagaccgaatctcatcaagaaaaatataatctgagctacatattgtactaaatcacttcccccctttttaaatttgaaatcagcttttcttttatatatatttattttgagatggagttttgctcttgtcacccagctggagtgcagtggtgcgatctcagcacactgcaacctctgcctcctgggttcaagtgattctcctgcctcagcctccggagtagctgggattacaggtgcctgccaccacacccaaccaaaatacaaaaatacaaaaaaaatttttgtatttttagtagagatggtgttttaccatgttggccaagctggtctcgaactcctgacctcaggtgatctgcccatcttggcctcccaaagtgctgggattatagctgtgagccactgcacccagccatcagcttttatttcatatgcatgcatagcatcctacaacaataactttaaaaaaaataagtcatcaccattttctatgattgcaacctatatagagaaatagcctggtgttatcctacaagacaatttccttaaaatgtgtgagtaatggctattaaatcattttatggagccatttctaaaacaatactctttgtcactgttaccataattacttttagttgtggccatattttaaagaacagaatgctttatcgtgactgttataaatacaaattatttttccccttgtgggaatcatcaggctaatttgtttaccattttccttctaaaacagatcattattaaaaggaaatcagtacaatgattgtgattaagatcaacagctctcttaattctttgttctgttgaatatcaagttttttctgccttcctacctctgtctttccgtaagacaaatccttttgctggcaaggggtatatgtgtgcatgcaactcctgacttatatctccactcttacacttgtgctaattgatcttaaaattaaagtccaggatgccaatgaaggaaataagctctgaaccacgcaggtcacagtttctgttggttgtatttgtgtcagggagctgtcagactctgcagtttcaaatttaagttctcaatggactctgagcgcatatccttgatgtgtgattcacacctgtggtatcatcatggggtcattttattgaaatgttgaacttgtttgcaggggccttaattctttagctttctgcaaaacctagttatgtgatgtgttctctgtttggggataatagagagtaaatggaaataagacattaacattgcccaacccctattatagttggtgttaataatctttgcctataggtttggaagtaccttggcttatataaccactattcagataaaacaaagaaatgatgacatcagtgtaagattgaatgagatttgaccactgcacatgccatgctttgcaatagtctaaaaacctggacagaatgatcagaaccatctaactcaagcccagggataagcaaacaatcagtaaaaaatgcttacatagaaagcgcatgatattttaatatgaatttttaatatttaattaattttagtggctattgtctaccttttatcaaataaacagctatttattattagaacttcttgctaatgattactgattttgactgtttgtaagtctagccttacaatttattcagaagtgtggttttaaacacataaagtgcttcatggcaatgcaaaatcttctactgaagtgttttgtattatttcgatttgaacttaagagattatgtggattctgtacataataggttttattcatagacttgatagtgtagcaggacgagccgcagacaagaacccctcagacaccgagttgtagaaggaaagggctttattcagctgggagcatcggcagacttatgtctccaaaaactgagctcccggagtgagcaattcctgtcccttttaagggcctacagctctaagggggtatgagtgaaagggtcatgattgattgagcaagcaggcggtgcgtgactgggggctgcatgcaccggtaatcagaacagaacaggacgggattttcacgatacttttccatacaatgtctgaaatctatagataacacaagcagttagctcaggggttgatttttaactaccaggcccagggcgcggtgctgggctatctgcctgtggattccgtttctgccttttagtttttacttcttctttctttggaggcagaaattgggtataagacaatatgatgggtggttgcctcccttaatagttaaatgatttggcaataacaacaggccgaaatataaaagagaaaaatttaggttggtgcaaaagtaattgcagtctttgcaattgagagtaatggctaaaaccacaattagttttgtaccaaaatatgtatttggatatatattctttaattgatgttaacttacacattaagtttttaaaatattagaaaacctacaaaatctgggttgaaaatgagtatttgaacttgaagcatggcaacctttcacccattttgttttaccaaattgtaaataaatcataacctggtaccatcacctagacagaaattttgtggaatatctacactataaataatggaacccctgtaaagtagtaactatttcaaagttaggatctcctggctttggcaaattttatttttgtgaaaattaaagttgggcattggcaacccaataccttttagtgttccactagaacaaaattaaatattaggccagtaatttgatgcagtggtatccaaacttttccatttcatgccctaaaaattagacactcacaacccccatcataggcatattcacttatttgtgtgttcatttttacgttgtaggtattactagactaacacatgtgttcatcataaatgaatgtataatatatatattttaaatgataaaatataaataatgagaaagaataaagatgaaaataatgttttattttgtttgttaatgattcaaaacaaatctttgccctccatatagagagtccatgtgtttgaatagactttattattttcaaaactcctcacttaacactttgatacaggaatccaaaactctgatcttaagtttggattttcttttccatatttggttttaatggctgtcactgctggggaaaaaaaagattcctcacacagatttgaagattaaaatggaaggtgtgcatcctttgccgaggctactgcttcattacactccttttattcattcccatctaccagttgtaaaggtttgactttctgatggatgcttaatttttaagtgcctgctaattacaatggcttgccactttcattaacatgccatacacttaaggcaaaactcactgttagctgtgagaaagtaaatacatatttcaaacagtcttcttcataaaattactttttaaatggattctcctgcaatatctgattgttttcacctcagaatgtaggaaaggagaaaacgtcagctctcaactctgccgttgtccttttgtttgccgttggcacaattgctaatgtggttcatctcaatgtctttgcagggtttagtccatttggtgagggtttgtttggttaaaatagataaggtagcctgtaaatccattgaatctgagcatgtgtacactgaatgtgttgaaacaagctgaaaagtcatcgtataagcaagggcaccactgtccaagcccttgaacgtgtgggacaggccaggttccatggctaatgcctgtaatcctaatgctttgggaggctgagccaggaggatcactttagtccaggagttcaaggcattgagctatgattaggccactgcactcctgcctgggtaacaaagtgagacctggtatcaaaaaaaaggacgggggaggggaaaggtgtggtgccctcttctttcctcaggtctcaagccctgtaagtcactaacaaccttttaacaaactaatgtggtgccagtgtcaataggtatgagtaaagctaatttcccttacaagtgaaattctagtacacttttcccataatccaatagatcatctttccttttatcctctgaacatatgcatgcatcttaaaagactacggatttaaagtactagattaggccaggcacggtggcacacacctgtaatcccaacactttgggaggccgaggcgggcggatcacgagatcaggagattgagaccatcctggctaacatggtgaaaccccatctctactgaaaaaaaatacaaaaaattagccgggtgaggtggtgggcgcctgtagtcccagctactcgggaggctgaggcaggagaatggtgtgaacccgggatggggagcttgcagtgagccgagatcacgccactgcactccaacctgggcaatagagcaagactctgtctcaaaaaaataaataaataaaataaaataaagtactagattatgtttttcttcccaattaaacagatcatgagttcttttggtgactagggtgttgtggcattttggaggcaggaaagatacaggaagttcccatgctataagccttgtctctttgaacatatctaagcatattagatctgttaatttttgcttcatatagtttgaaggtataattattgggtgtatacatttttagtattgtttctcaaatacattgatctctttattatgaaatgttctttctgtattttcttgccttaaagtaatgctgttcgatacagtagccattagccatgtgcttatttaaatttaaattaattaaagaaaaatataaaaattcagccccgcctttgtgctagtcacatttcagatgctcaatagggctattggttaccctatgggatagcacagagaacatttccatcattacagaaagttctattgggtcgggctgccttaaggctacttcatctaatattaaaacaactatatcaagggtttttttggttgacaattatatggagaattaaataaatcctgaatcacagatgaagattttagcatatccctctctgttactaacaaaataagcaggaaggaaaaaaaaagaaaatcactaagcacacagaggatttgtttaacacaattaaccaacataatataattcacatatttaatgcattacattcaacagttatataatacaatacgcattaagtacgcaatgcggacacattggaagatacacctggctgccaagtgtcctgtagggaggtgttgattgtagagacacacagcaggggctatataattccataatcaggaaacccagcaaaactggtatcacacgaaggaattgcaactattgtattagtccattctcacacatctataaagaactacctgagagtgcgtaattaataaagaaaagaggtttaattggctctgcagcctgtacaagtagcatggctggggaagcctacaatcatggcagaaggtgaaggggaagcaggcacttcttacatggctggagcaggaagaagagaataaagggggaggtgccacatacttttaaacaaccagatctcatgagaagtcactcactattatgagaacagcaagggagaaatctgcccgcatgataaaatcacctcccagcaggcccctcctccaacactggggattactattcaacatgagatttgagggaggacacaaatccaaaccatatcacctatggtttgggttttggtagcacaacactggtacaacctactactcagggatcctcaaactttaatatgcatgctaatcaacttgaggttctattaaaatgcagattttaatagagtaggtctaggtgcactttgtaacaagtacactttgttactgactttaaaacgagctcccaggtcatgctaatgttactggtccgtggaccacactttgagtaggaagattctaactcaaaagcccaaactagtagcttaaacaccaaatcatgacagaagctgtttcccctggcttgtatcatattgattaacacagtaaagaattagctgctgacatgtacaaagtgtgaagtttcacataagcataagcacctgaagcgtctcttgaagtctgggaagatccggccagggcaagtctgcttccatacatggtccatacaaaagtccactggagcagagtagaggccactagctttcgagagcccatgatttatccttcaccataagtcccacctccactacactgacaccttgccaaccatccatctcacttctttatttgcctttctaaccttctgagacaaggactctcaacctaagctaaatattggaatcagaggagctttgagaaatactgatgttttggtctcagccccaaagatcttgatatggtcatttcaaggggtgggaaaagcctgggcattttaaaagctacccaagtgattctaatatgaagccaaggttgaagacttctgtttaaatcaatttagtgacactagcaagattctcacacaccatcctcagacattctgattctgaagctcaggatcaccacttcctaatatttgcaggatctgagacaaaagaaagctctcaatctatagcctttcaccttgtctttctacttcccacccactcctatactttcttgcaccatgaaggatcttctgtatatagaattagacacacatccaagatctgtccttactccctttcaaacacccagcccttggtcactcttgaacttagacctttgcaaaatgactgcaaggtctgccattagaggaagaggaagagggcctaaaaaggggtcttggggccagttgggaagggaattttggtatcttgttgaagtgttttctgacaccaatctcttctccaacatcggctgaatgtcgaaccattcaattcaattttgatgcacctggatttagggcagaccccacagcttaagtcccacaagactgcccccacttcaggtgccagttgcaagacttggaccacccatacttctgaccaaccagctgtaagtcagaggttcccacaacactgtcctcagcttcaataatttactagaacagctcacagaactcagaaaatccactttacttacatttagatttacagtttatcaagaaggatacagatcaacagccagatgaagaggtatatagggtatcgtagtctgctttgtgctgctataacaaaatgcctgagactggcaatttatacgaacagaaatctattttctcacagttctggaggtttgaaagtccaaaatcaaggcgccagcaggttcggttgtctggtaagggctgcatcttccagaggggaggaacgccatgtcctcacatgatggaagacagaagagcaagagagaccaatgctatcaaaagcctttctaaggaccttaatcacactcatgaaaaagggccctcttgacttaatcacctcttgtttgccccacctgttaataccatcacattggccattaagtttcaacactttaactctagagggaacacattcaaatcatagcacaggacaaggtctggaagagtcccaagaacatgagcttatgatcctacggagttagggtgtgctgccctcctagttcatggatgtattcaccaacctggaagctttacatcattatttaagagtttttataactcaatctttagctctcccaccaggttagtgagggaggctgaaagttccaaccctccagtcagttgatctgtctggtgatcacccctatcctgaggctctccaggggccctattctaaatctacttattaacataaattcagatatgattgaaaggggtttacacaaggcctccttatcactgtgaaaaacccaagcgtcttaggaggtctatgccagaaacctgggacaaagactaaatatatttcttatatcacatctgggtaccccagcattagggaggccatgtctccatgtgcaggagtcatagtcttgtgtactaagctactcacctcatgaggagtgtgtggatgaaggagggctggggggccatgagggcccaagggatgggcctgtcttgcccacatctggaagtccgggatgaggactgagactctctttgtagcaggttccccccagtgattctgatgtcagttgtccacagggtgcacttagaaagacaaactctgcagaaggatcagagctaaagaagaatagcttcccctcttttctctctgctgcctaacatttcttagtactagtcagagcttgggagccacacttggaatttcaaaagaggaatttttcatgcttttctaaatggattgcattttgggggcttggaagccaaacacttagaatctgtaaacagtttgtcctgggagagaatggctgcaggctttcagaacaagagagggaaatttaggctgactgcaccctctgcttctcaaagctctttctgctaaaatgctatagttatatgtggtcgtagaaataaaagagaagccaaacactcaagtgggcactgcttcccattttttgactaatgagagattattcaaaatcttgatattgagttcttactacctacccaagcactgagctgtcttctgtaatcatccacaatatctatgatgtcagctccatcattatcattttatgtaaggaaactgagatgcagactggccactggctcaagctcatacaactattcactgacagagttaagaaccaagcagggccgggtgcggtggctcacacctgtaatcccagcactttgggaggccgaggcaggcagatcacctgaggtcaggagttcgagactagcctggccaacatggcaaaaccccatctctactaaaaacacaaaaattagtagggcatgatggtgtgcgcctgtagtcccagctatgtgggaggctgaggctggagaatcgcttgaatctaggaggtggaggttgcgttgagccgagatcatgccactgcactccagcctgggtgacagaacaagactccatctcaataaaataaaattaaattaaaaattaaaagaaaatataaaaaaaagaaccaagcagggctgagcgcgatggctcatgcctgtaatcccagcactttgggaggccaaggtgggcggatcacgaggtcaagagatcgagaccatcctggccaacatggtgaaacctcatatctactaaaaatacaaaaattagctgggcatgctggtgcaggcctgtagtcccagctacttgggaggctgaggcaggagaattgcttgaacccaggaggcggaggttgcagtgagccgagatcacgccactgcactccagcctggcgacagagcaagactccgtctaaaaataaaaaaaagaacgaagcagcccggccctagaactcatgtgctctaaaccactactctaaaccagctctttaaaacacgtaagtgtaaatgtgcacagatttcaatttagagctgtgtgactcccagcagatttcttttttcttgagcaaaggagatgccactgtgaatattaatgtctgtcatagccagagcagacactcttcagcttttgggcaaactaaaatgctcaaaaatacccacaggcacaacattttctaatcgtgcttccagagccaggcagtgtgttcatgcatgtaagacgctgtataaatgtaggtagtagcaccaatagtgctcatgaattatggatgaagaggaacatccagagtcaaacattcctgagaaagcagaccaggctccctttactgggttaggaaaagataaaaggctaaacttcccaaggcagttgactggtgatttttcattctaacatccgaaaaaataggaataaagttgctatggtttgaatatatgtgtcccttcaaaattcatgctgaaatttaatccctagtaaaacagtattaagtgaggactttacgaggtttaggtcatgagggccttacctccatgaatggggatagtgcccttataaaagggcttgagggagcctgctttgctctttttgcccttctgccatgtgaggacacagcaaaaaggtatcatcttggatgcaggagatgagccctcaccagacgccaaatcttctggtgccatggtcttggaattcccagcctccagaactgtgagaaataaatttctattaattataaattacctggtctaagatattatgttatagcagcaggaatgaaccgagacagcagcctatttcagaagcctgtctctgatgctcctattccaaccaaaatctttaagccagagatcgcaaccagtaacctggctgaataatccacaaacatggtttattgtactcacacattgttataatgtttttttcttagtgttctttcatcttcttgttgaacaggatgccaactttaaaaataaggagatatcctttaaaaatgtttccttgctttaattgaaatattcaaagacctggctcactggggccatgttccaatggacttggcagcaattagctggatctgaggagtggaatccccgattagatgaccttgtgtgctccctttagccacagtcaccatcactgtttgttaccttatactcacataccaccactgactaccaccagtgcttttcactctttttctttacctctcttcctcctaaagtcatttgcatttaataactgctaatttcctgttattcaaggtccctagcaatttatgatatatgtgtttgcttatataaacttgcttcaacaggccacagtagcctaggaggtagtcattgcttgaagatttatactgggctgcaaaataaccctgagtgtctactcaactttcagttcgaagtgccttatcctgtatggtagtgggttactttttgcatgccaactccatcatatggtagcagatgcctgggactttttgttgataaggattccaaggctatctagatggcctggaagtaccactaagattgattagtgatgtctgccatagtcaccccagctgctgctatccatcagaagtcatcagccctgtgcttccatctccatttctttttttggttttttttttttcatttttttcattttttttcattctgagtgtcatcatttaggagactcacacaaaagtaagagaatctttctagggaaatgttctcttttctttgcttgaactgaagttgcaatttagaggcagttacccttaaccctggcatctttttcccccagtacaagtgttcatagaagcaccacatgtaacaggcaaaagctggaaacaacctaaatgtccatcaacagtggcatgggtaaatgaagtgtggtgtattcacatactttatagcaatttttaaaaacccgactacagctatctacaacaacaaaaaaagaagccagatgcaaagaactatagactgtatgactgtttatataaagttgcaaaataggctgctgtctcagttcattcctgctgccaggttttatctctgcctcctaattattctgtcatttcagccacatctggggttactaagtgtcatttctaaattgtacctactgacattagcgaatatctttttgctggtctcccaaaagaaagatccatcatttttctaactcctaattgaagaacctaagaaaattgctgtgttacaaagtgttccttttcatcaaccacaaaacaatcctccaggacagagttgagcaaaaccaattctgtccaatccagtctgagtctaatgacagaaactactctgagttaccttattcctgatattccaggactgacatcagggcctctgtcccaagaagtggaggaaggcagaactcccactagccatatcccagcctccttaagatgggcctgtggtcctgggaaatctgctcttctaacctttcctttgtccacagaagccacatcagtagagggtcagttacagacaaggggcacacagtgaataaggaggcactcacttcttggattaattggcttagtgtgagaaggctcacttttacatcctaagattggaaagtgccagaggcccccacaaatctccaaaagcatagtttgctctccaattttctcaactctttcccggtttgtaatgtttattgttttcttataatatttaccaaccatcttacctcaccaatgctagatcctacaggtaacagaagcacagtataccagaatgatcacatccaatagcccctggctggctccaggtgtcatgaagtgacctctgattttgttactgcccctgagtggtggccagaagttacattatgtcagtttacagtgtggcagcccccatatccattggggacatgagtgtcaggcaggtcaggtgagtgtcaccacctggaaagtggaagcatctctaaaaacaacttccacagaatgcatgaatttacagatgatatgaaaacatgtgcatattgaattttctgaaaaatggcttatcacaaaatttaaaaaaagtatttatcaaaggaactttgggcacataaggaaataaatccaatagtatgctcatgacaattagttatataaataaaataaagtaggttattagtccatataagatagcctcaggaaaaaattaaatgcccagataaaaagtatgcagcttgacaaatttttacagaatttatgaaattaccacttgtgtcaagatacagaacattatcaacaccccagaaacttccctcgtgctccaacccagtcagtactacctccatccggaagtaacagctattctgatgtcagtcaacacagagattagtttttctgttttgcaactttatataaacagtcatacagtctatagttctttgcatctggcttctttttttgttgttgtagatagctgtagtcgggtttttaaaaattgctataaagtatgtgaatacaccacacttcatttacccattccactgttgatggacatttaggttgtttccagcttttgcctattacatgtggtgcttctatgaacacttgtactgggggaaaaaaaatgccagggttaagggtaactgcctctaaattgcaacttcagttcaagcaaagaaaagagaacatttccctagaaagattctcttacttttgtgtgagtctcctaaatgatgacactcagaataagacgctttcttctccttccacagtcccctgtgctgaggcattttatgtgattgtgtgtgtaagcttcaaagcgttattcaacaaagaagcgctgttctcccaagctctaaccatttactcgtaatgggcatatggtatttcgagtgctgtactttactatttcaccactagagggcaagaggagccccacaatgcttgacattgccagatctgcagtcaaaatgattaatcatgaggcaaaaacaagaagccagagggaaaaaaggaagagctcacaaaggcaaaataaacatccataaacttaaactttcctgggtagggaagatctgaaaaatgtcacccatgagccactttctaacactcgttccatctttctttttccagtgtgcaaaactcaattgcacagtcctcagttgctgaaactaccacccaacagggtgggactagatcaggcagacagatctcagagggcatttttttttagcactgcctagagccttggttattaggaagccgagaatcttgcagaggtcccaggcctcaggggctctgaacaagcaacagagagttctgtgatttcttcttcattctaagtaatatttcttccaataacaccatggtgtttactaaaatcaaggcactaatgagtaaggctaccagccccaacacctctcctttttctcctcttctcccgggtccaggcccttctacctgccacaaacttaatcaagattacagaatggagatgtgttgttttttgcaaggggaggggagtagggaaattaattacgaagccaagttgctgttaaactatttataataaatttctactggaaaaggacctttggctgacaatcgttttcttctgcctcggcatgaccaaatacagtaagaattcaaaaggaaaactgaaaagcgaggaagagcccacagctggagcagtctgttttcacgtctccacgctggcgaacgacaaactcggcaaggagcctcctgtgtatttcctgtcctcgttatctcagttcttgctctgaagggctaagaagccttcaccgttagccaagactccttcgtgcttcagcttaattttccttgcataattttaaatacagatcatgtctacagtacagcaattaatggatagcctaaagacttattatttcaaactaattgatatgtaggaaaagtttaaataacataacggagaggggaaattttaaacgatgtatgcacaatgaatttaaaatttctctctgttgcagatggtagcaaaaacatatgattaatagggggatgtgatcaaaatgtagaactgacttggaaatctttctctttttgatattcttgagcatatgattggaaggaagaaagattcagacatttcagaaatggggtaaggggtgcaggggagagcagattcttccccccccactcactcccaccaattctagggagttatctcacaagataaaagaacacctgagtatattttgagttgtgctgttaggtcagaaataagaaatgggagaagaatgccattatttccattctaactctttggtcaaatccccctcttgagataaacttgagagagaagtctacaaagaccaagttcacccagctgcagcagaacctgttccaagtcaccagcactcccagacccaggattccctccaaattctaagaaatgtgctgtgatgaatcacctcactgacacacaaaaaaacaaaaatctttctaatttccccattcacattccagcaagtttaataggaaagtttagaaaactcatctgaagaaagaatactcttcaaatgggagagagcaggaacattttgttctaagaagggattgagacctaatgatgccagacaacattttaaatatcagaacacagcatttgtaagaaaatagaatctgcttcaaccataaaccataaggggggaaaactacctttaaaatgtattttcttcatatcaaattcatgtcataagaatatctgaatgacttctggccaagtcacttaaattttgtggtcttcagtctttttggtcttctcagatgtaaaatttgccacagactggttattttttagaaccctttcttcccttctgttctcctactttatttaggtagctctacacacacattttgaaaattggatgaacaacctccttctcattggtccatgcaagaccatattactgtatttataatataatacacacccatatacaccacaaaaactacaatactggtttctccccctctggtaccctggcctttcattctccaccctctgcccttcaaggtaacaatgaatctgaaacgtgtgcatgtatatattcctgttttttatatttacatggttatagatatacatgtgcatatatatcatgcatatgtattcctataacactttatttttttatcttagttgttttaacttcataaaaatggtatcatatggagtatcatattgaaatatgataatgtaagttaaaggaccatactgaacctatactgtataaaatttgggggagcctacaatttttcacttaaaaatatgttgcttactttgggaggctgaggctggtgaatcacttgaggccaggagttcgagaccagcctggccaacatgataaaaccctgtctatactaaaaatacaaaaattagctgggcgtgggggcacacgcctgtagttcccagctactggggaggctgaggcatgagaattgcttcagccagggaggtggagtttacagtgagccgagatcacaccactgcactccagcctgggcaacagagcaagactgtgtctcaaaaaaataaataaataaaaagagccagacacaaaaaagtatatacattattattcagtgtatatgaagagttagaaaatatgctatcttgggtaggggacaggatggctagtgattggaaggtggcaggtagaggtcttatgaagtgctggtattgatctgagtgctggttaaatgggtgtgttcactttgtggaagaaaatcctaagtccatgaatttgttgtatcagttagctattgctgtataacaaattccaccacaaaactcaggggcctaaaacaataagcatttattattatccacaagctggtgagctgggaagttctcctggtcttagttgttctcacttatgtgtctggagtcaactgagcatgaggtggacagctctgctggtgatactggttggacccgctttcatgtttgagggtcacttggatgtaggttggtctaatatggcctctgctagaacgaccggatctctccacttagtctctaatctgtgaacagacacgcccaggcttgttcacttgctggtggcagggtttcaatagcaagagtagaggcacatgtggccctttgagaacaactcagcactgcaacagtatcacttttgtcatatcctattgacaaaacaagtcacaaaagaggagtgaagaatggtgggtttttgaaaactcaatctaccacacttctcttatgtgaacttctctctgtgtactaatgaaaaaaatttaaataaagtatatctaagtataaggtatctatattgttaaatgttgctatagtttattttgacttattctattccatgaatgtatcgcacttatccattctactgtcagtttgcatttagtgatgtccagttgattgctgttttaagcagatctgctgtgaacatgccatctcatatctcctagtatgcaaactctgtaccagaagttttcttggttgtataccaaactgtggaattactgggccatagggaatatgaatcttccattttacatgatgatgctaaattgtcttctgaagtaactataccactttacactttcttcagcaatatatgaaagactgtattaccctgacacttgccaatagttgatattaacgtcagacttcctaatatttcctactaagatgagtatgaaatgatatctcaatgtggtctagatctgcctttttctgatcagtgaagaaactgaccatcccttctatttagtttgtttttgttttgcctttagccacatgttccttcttaagcaaaatgcctctttgtatcttttggtaatttttttcaattgagtgattggtcttctcattacttcataacaattctttatatattctcaatactattcttttgtcagatgtgtttgttgtgaaaatatttgcccagtttatcacttgcttctcaccttattgagggtgtcatttgaataagtttcataattttaagtatttgaattaaatttttatttaatttttattgttagctttacttgaggcctatttagccaatccttaactaccccaggatctgaaatagattaaaggtttagcagtcaaaacataaactaaatactgtttcatttgcactcacacacacacaccacggcctgctcttgttacaagcagttttggtaatgtggctcctgtgttcattatgaaatatttaggtatggacttgtcctcagtcatagcatctaaatatcacaaactcaggaaatctaaattgttctgacaagttacaagaataatttcaaagaacattttcttttggcagtagaccctgatgttgtgtagtaatggaaatgtttaaattccaatgataggacagggatggccctggctagaataacacaaaaatcattcaaatctaaatggcataaggctgcagcagtccaagtgagatccctcggggagtcttggaccttttccaagatgtaggctctcttcagtgtgagtgtgcagagattgtatgattccactggggtcacttccactgatgggttcaatggactacagcactgaccttcacatggcttgttttcatagcttcgagtcctaaagggagatagggtcataggaatatttcaacagtgtaaacagctcacaagtcttccttgctcacttacttagaggtgaccagatgaactgaacataccctaatgctaggctcttaaaataggatcttgttttaaaaaggggttcagtagacaaagaaggccattccctttttcccaactcttgttcttagggtagtgttctcaaactctggcaatttgagtgtgcaaaaaaaaaaaaaaaaaaaattagagtagtggaagtgggacagatagttcctctttagcctcctgacatacctcttgtttggagggataagataatctctcagattgccacctgggcaaggaaactgggcaacacacttccaactcagaagccctgaggttggtggcctgctacctctttgctggtccctcttcctcaaggtttccgctttggaagtagggactgattcttaattggttcatctacttctaaggccagcacttaggaagagttagcttgttcttgattggctcaagaactttaattaataaagaagcaccgaatccagaatatttataaataacatctgctcacaaatagaacattgttccaaatagttcagtctaaacactttcagcttcaaatccacattaagaaaatcataacaattacctttaaactcatgtttccaaaaatgtgatgtgtatgtggattacctgtggatcttgttaatatgcaaattctcattcagtagatctggagtgggcctgaagtgatactactggtcctaggaccacactttgagtagcaaggctttctaaagttctgctctcccgcacagctgaattgaataacttttccttctagagatggcatcatggttagcttttgaaaaccttttggttttttttttaacttcagtcttctagtaattcaagaaagctggctattttttcaatctttctggatgttttaaggatctccttctaattctgaaatgttgctcaggtatttcttgttgaagtcttttccacagggtagactctagcttggggtctattggagcaagttaaatgtcttcaaaggtgatgggttattcaactgaataaatgttttctagaatgtggtgaaacctggaaaatacagtgggagtaggagagggaagaaaaaaaaaagacataatatacttttctccactctacctaccatgataatacatattaatcttgcctttattctttctttattgtatataaaagcttccactaactttccattctagggagtcattgagagaatataaatatgtgggctttttgttaaagcctgataggagaagagattattataagtaattggagactgtggagtcagaataactgagtttgaattctgacttcatcatttaccagctgtgttgcttaaccataaaatgctcacaatatttactccagcgaataatgggagaattcacagaggtaatccttgcagataatccctgctaatcatttaacctagtgccaggatatagtaaatgctcaataaatatttatagtagtagtcattgttatttgataactattacagaatagctcccaagggcctactgaagaaaagctttgtgcttaagacactggcaataagttcatttccatatggtgtaacttgaagctttggttttatagattaactcagagacaagtcctaccacagtgattcacagttcctgaattcaaaacactgtgcatatcactgatttggcatttcaccttatatgactagctcgtgttattatttaactttgccttggctcactaattttattttcagtttctaacctttaagaggtaacagttttatactgttcaagactccccaaaccaaataccacagagccatttgtttacattagtaggtccccaataaatattcattagttatttcactgattaattaaagtaatccattcatctccacagggactcaggctggctgaatcaggagagacatcttcagatctattcctctttgagaaattagtataatgtcagtgcattctcatgtgtttcttgaattatgagctccctgatgtctaaagaagactcacagggaagagttcatatactgacagaacaatcattaattagttttcaaactagttttgatttgaaactaagtaatttcaatcagttttttgactttcaactcagtgttgtgacatcatggtggacacaactttcttagaggtatcaataccatcatcatgtccatgtttgatttgacagacaaatattgcaattttattctgttggacattttccaaagaagttggttactgatttattaaataaatatacatattttagggtagtggaagaagaaggtgaatagaaattaatgggtgagcaaaggtgagggaaaaccaaatcaccagttttctttctgattatattttaatctaaaaggctatgtttttaatcaggttatatgtcttgataagtggcgtttctacttaaaaaatgttggttgtatttgtatcccaagtaggaaatgcaaacatacttgtataaagcaaacaagtttaacttgtgtgtttgtattaatgatatgtgatcaaggcacaggaaatgttagtaaagaatcatacacttattatgtttgtttgggacagaacaaaggataagtcattagttggtgagttcagtcattttctttgagataaaacatttggttaaaaggcaggctagcccaggcatcatggctcatgcctgtaatcccagcactttgagaggctcacgcctgtaatcccagcactttggaaggccaaggcaggtggatcacgaggtcaagagattgagaccatcttggccaacatggtgaaaccccgtctctactaaaaatacaaaaattagctgggcatggtggcgcgcgcctgtagtcccagctactcgggcggctgaggcaggagaatcgcttgaacccgggaggcggagcttgcagtgaggtgagatcgtgccactgcactccagcctggtgacagagtgagactctacctcaaaaaaaaaaaaaaaaaaaagagatcaacttgggcaatgtagcaaaaccccatctttataaaaatctagaacttaaataaaattaaaaaggcaggctgatggaaacaatttaattaacttgatttactgggaaacattgatttattggaaaaacaatgaaaatgtacattgatttattggaacttgattaacttgacttattggaaaacattgaaaacatacattgggacaactggatattagatatttattttaatgcagaagacttttctttaaaattgtatttcctttaaaaatagactggcattatgttattatttaattattattttaatgcaaaagctattttcttaaggatactatttatatttctgctactgaatacagcacagtaatatatttcctcttgtagaatacatttagtcttgttttgatgggataaactgcttttgaatatactcactatgtcatgcatgatttatttatttaaatttcagcataatttttcttgacaacctgttctttcacttgaaatgttatgtaacaaaaacaccaggaccaactggcattttagtttatccgtctattccatatgctgctggatgaagcggaaaatgaatgtgtatcatcactatgctgggcacattttattcgcagcctgtcttttctcctgtacatcaatttctcttctccgtttggaaatagcttcatagcaggttaggtctatagaccttaacctgagtgatcacatataatgtaacaggaatctaattggctatggttagagtcagggaccaaaatatattcaaacttacttggattgctgcttgaatataatcacttcaagtccaggtagaactatttagactcagaaagaaattgatttttttaaatctaaacatagttactgggtaatttatgatagatctccagcccaaacatttcataaacaagtcaaataaggtcagcatgcatcaaggactagggcacattaatccaaaactacaagaaaaccctgcaatgtgtccactcaatatatgccagccaataaattcaaactaaggactaagctaaggtcttcatttgggttcccccagaaacaaatcctgagatgaggatttgagtataatagtgtttctgagcagtggtcccaggaaaccagcagggaagtagagaagtgaagcaggaaagggagggtagcaattaaaagtgtggcttttctcagacaagttacaaatgtgggcaactggtgatcaagcccagcatggaattctgggaaaccatgtagactatgcaccttagagttatttcttgcaaagggtgagggagctggagtctatatacaccaactgagcaggcagtttcagccgtttttgcaccctgcaagagaaagcaagctgttggaattaggacagtctgcatgacaatggttaggccaaagagctataaactgggcactaacaatcattagcttcaaattggatgagaagttcgccaagattataatgctagagtctccataattcaaatttcagtggcattaaacccacacctgcatctgacaataatcaagtatgtttgggtttagaaaatattttccaaactgacactacttttttggcaagacttagccattaaatacatgaatgatcctcaacaattcatgtaaatgagaatcacctgcaagccttcttcaagctctaaatcaatagttctcacactttgggattcatcagaatcaggtaggagacaataaaacacagatgactgggctcccacccccaaagcttccgacttagtaagtttagggtgagcctgagaacatgtgtttctaacaagatcccagatgaagctgatgctgctgttcgggagacctcaatttgggagcttctgctctgtataacctcacacaccgtacttgctcctgccctaatcagttttgtattttaccattataaccaaaagaagtacattatattcttcagataaagaaaatgttaagaggccttgattttcaatctacttctaactggaagagttaagcaaaggaagttttttctacctctgaagaaggcaaaccacacaaagttggaatcttctatccagagttgaaaaccctattatacttataatcatttttttattaacatatactgaaagatggtcattcatagcaagaactcataggtaaagattaagttggtagggtttctgagtggcattttacatagcactatgaaaaattatgcacatgattatcttttcttattcatcactgatgtatcaagagatatcttcaattttcagaatgttttatttttcttggcatacaattagacaaaatatttcagttttcaaaaaacaattcagagttcttattatttttcctcttttagttattttaaaatttgatttgaagtgctgcaaagagaaagggggaaatgatgtggtaggcctttgatgaagttaagtggcagtcgcctggacaaatgtgcaaaaagactggcattcagtaatatccagctcttctggtcttagatgatttctattctgtgatgccaaggagaggtagtcactccctcctttgtgttacatttgtatgttgcatataattttcccatgtatattgcagtataccatgtatgttgcatataattttacatatctcagcataacaccttattattttatgtttcacattctcctactagtcttgggacttcctgaagccagggctgtgtctcactcatgtctctgcctagcacctgtcacagtgctaggtttgcagaagtacacttgataaatttttggacacatgaatgaataaatcaatgaatgtgtgagggagaggaggccacaaaaagcgagtagatgtaaatagagaatgagccatgaatcagtggtattggccattcaattcagtattccaagtattgcagtatgttcccatgatttggaattaggatggctctctggctgacatgtcaaccaagaactagaacaggcttgttagaactagaacctagaagatttttcctgtcactggtaagattagctgtagttttctctaaagccatttacccttgtgtaagtaaggatgcctatgatgcatcagaatggcttttaatctcctaggttgagtgatctgaagaaacccccaagttttgggaagcagcgccagaattatatatgtcaggatatggttatctgatgggaagatggaaggagaaagtaagatttagcagaccagctctgccttgtgaatctaagcagaagaaaaacgaatagtgttttaaaactaatttgcaattgtactgaattgaagtcaccggttcctgtccttataagagtaacttcactgcggccatagattctgtatataccttaatccagtgataacaatggaagaaaagggagttttttttcatccttgcactttccttgtagaggagaaagagataaacattgatggaaagtaaaagttcccctgggctttataacactagctctttctttctcatagttataaggtagttataaagtactcaagatttatagttaggattattctctaattctactttaacttcagaataaccaaaaaggcccccagaaatttaagaggccatccttatggcataaacattggctaataaagattaatcataaataagagaaacactcatatctgcatgtatattcatcattcccctgacctcaaaataaatcatgcaacacaaaatatgtatgtgagaatgtattggttagcataatactggctgctgtgacaaacagtaccaaaatatcaatggcttcatacaatagaattttatttcttttttgtacaatagtccaacataagtgtttccagttgatgaacagtttatctcatcatggcaattcagagaaccaggttcctttcataatgtggctccatcatcccctaggatcttgctggaaaggggaaagaaatagtagagattccccatatgtccccaaaaagccctgccctaacttttcattggcaagaatttttcaaatggctatgcctggattaaaaagtggtagggaggacttgtaaacattgtccttggatttggcagctgcacccaggcacagcagacaccgtggacaggtgcctgcaaattttgaggataccgacttattttctgcaatgtagaccaaaatactggaatccaaacctgctaaatgtagaattattctaaattgactgctactcacaaagaccctaaagataaaatcagtaaagtgacgactttgtattccaagtcatctctgtagacctcttcgagaaatggatctattaacaaaaggatctgggctagaagacttacaaaagaggatttctataaaaacaacttgctattcaatttatctgacttttcattccaaacccgatgtgtttagcacagttacatcaccacacttacgtgacgaagaaggaaatgggaaaagagggagatgtccaatattctctagcagatgccttttattcaagaataggatcaaaaatttacctgggggtaaggaaagtgtcttcctcttcccagtgatagttgccttgttaaagactttagacaccagcgcaatgtggttaagtctccactagtgcaacaaagaaaaggatagaggccagtccctgaatagggaggccccagcagactttcagatggttaactatcaagtccaaagacagacagatggaatacattacccaaatactccggaagttgcaaatcgacctgcatggtgttttgtaaatttctaatttaaggcaacactgacaaattagaaggtttaacacaaaatccagatttctggattcttttgaaaaatcaaaagaataatctagttagtagaactagttagtagaactagttagtagtaatctagttagaagaacgggtgtctgctgtctgtaaccacccagctcctgtcactcgtttgccttttgatctggccctgcctcagtttgctctccctgagaaatcccatcattgttttcagcttcaccttggggggagaattcaagcacaacaagcaggcttctcaaaatgcctgtgaggccaagaaacaaatgtctagtttcctttcagataaaattgtaaatactcacccaaaaaccacagcaatttaagcaggagacataaacatcatatttagaaggagggactatgtaattaggacatactcccttaagcatcaaaatcaattatcctgataaaaccctaggacggctaaccactcttgaaatatacatttataaaaagaaaaagaaaaaccaaaactaattttaggtgatcgggagaaggatgttctccagggacataactgagttcattctaggacatttgattcagcctgtcccttgttttgtaaatgccatgcacaggctttgagtcgagaaagtggttgtagctagggctcaagttcagtaattactaatccttggttaatcttaaaaggagttatcataaaggcatgcaccaatgaggagactctgatccaagctgaggccaacacaagggcaggacccccacaggaaaaagcctttggagacccaagacttcctgaagaggctgcttcatgggactccaggttctctgagatggttgcttgcaccgtctgcactattgaccttgcttctaatgtgactcggtgtaagaactgaattcataatgtatgttcagttctttctggttggtggcattccacctgattgaaaagaaatacatccttcatctaaaaataattagcctctgaatggccttttatttcaattgcccggagggcttttattgattttttttcagggtttgtgtggttaagagaatgggattcttctggtggtgtctttcttagcctctctcgaataggctgtcatgcccttgctcctcatgtgcggctaaatcagaagctacaaagtagtgacttgcagactcagttgggccttttattggactcttggtatatgttaaaattgctgaatttgagtgttttacacaagaaatacaattccacttggctacagattccactacttctcaattgccttataccagatctcattcacagatttgtgttgcttcttgagccccatagatatttgagttcagagattctgaaattaatatacatgtattaagttaatacatgtaaggtcctaggaacagtgcctgccacacaataagcacttaattaattttaatgttactattattatagtaaataattattttatggttctatatttccttgtttattagcaatttactaggttggttataacccaagagatttttttctttttcttttaagctatgatttctccttattccagttttccatttgcttgttcttttttatggtatccgattctttacagaagtattctgattaaattagactgtacttaatggaaaacagaaaaacaactagctgatcaaataaacatttcctaaactgaagaatgacacagagggagtgaaaaaccaggatcttccaagtatgacagacacaaagaaaagcctgtgatgatttagaaatgtgctgggctaattgcagctggttgagggtcctcgttgttttccataaaactgtattgtattatgaagaggacagcaggtcaataaccctgggccatgggacccctcttcagcatcacttttcagtaaaagacaattcccgattattttgtgaaagcaactttgaaatcctaaacatgaaaggaaaacacattggaatgttttgttatattcccctcaacacacaagaatatcaggttcctgagaccttcacacatcctgtttttacatagtgaacagttggcctggaatggtggggatggagccctggataggaggcaagaatttatttattttacttatgtattcattttgagacagcatctcactctgtcacccaggctggagtgcagtggcaccatcttggctcacttcaacctccgcctcccaggttcaagtgattcttgcgcctcagcctcccaggcagctggggctacaggcaccagccaccacacgcagccagtttttttttatttttagtagagatgggatttcaccatgttggccaggatgatctcaaactcctggcctcaagtgatccacccacctcggcctcccaaagtgctgggattacagacgtgagccactgcacctggccaggaggcaagaatttagtattcagatcttgattctgcgctgaaccacttggatggtaggctttagtctcctcacttcatgattgatgggatttgatgaacaatgtgctgaatgtttattctctcaagattataaaacaagtatcttaagcttccttaccccagagcacaggatcttcaaagacttagaacatcttttggtatttcaaatacaatagtaactttctgtttgacaaacgtctttgggttattatcttgattatttttttttattatactttaagttttagggtacatgtgcacaacatgcaggttatttatcatttttgtacaatcaaaatttgtttcctaattcacaatcatttttatgcccagctgagtcttccaaaagaaaacacctaactaaaaatagaaaacttctaggccttaatcgcaggccccataaggagaaagtattccagtgctgacataaaaagttcagggccaggaactcacatattagctgggctgacgtggcctgctgagtagcataattattgtcctaaattgtagtataagttgcttttagggtaagtggcttgggtatgtatataaagcaataagaattttgctcctggaaaatggtaaacaactcatttcatgtcaaggccacagaacttaatgcacacttttgagagaaattataagagtcatggggaaatgcaacaataataccaaataacagacacaaaacttcactggcttacaataataaacatttatttagttcataagattgtggggttcagctgatcttggctgagtgtggcggagcttagctggacttgttcatacatctgtggttcattatgggtcaggcaggtagctctgtagctctgctgatcttgactgacttacatctctgggtatcagttggatgttgatgaatctaggataatttggggtatgggactgggatgactgaggtgactcaactcttttccttgtgttaaatcttctactagagtagtctaagcatgttcccgtgacatgccataggaataggagtgaaagctaagtaagggcttttttaagcctctgcataggccatgcctgctaacatcctattaaccaatgtcatcgcatgaccacatcatcttcaaggaatggagaaatagactcctcatctctcataagagaagctgagaatcataaagcaaaggctctgggtacagggaggagccattaatccagtcaatctaccacagaggagagaattgacgaggtcctggtcctggttttgctactagccagccatatccttgagaaagaccctaacttctctgggccacagattttcactaaataaaagaaaggatttgagtataattgctaaagtcattttctgagacgtcaaagtcatgaagggtttgactatgtaattgttaaatgttcttttttcaggttcctacagtaatctctagacacctgtgagatgattagaaattttgaaatatatttcaggactcagaggaggtataaaagcatggactatgttaggagttttcctctgtggcggtttcatggaatatatgcatatatagaggagttcacacctaagaactatgtcagaatgcatttggcttttgacttgaaataaagtttaaaaaggaaatgcatgttaggaactgtgcttggtaaatcacatggtctctagtttctgtctttcctcttttattgattcagtatttggatctacttagtattttgcctacctcgtccttgactcctccaaccttcctttctggcaacttagcaaccctcattctgcccttcacccaacagccttatcaacactttgaatctaaatctgagcattagcattccagaagtctgaagatatgagatctacaaaagaatggtttaatatttatctagaccctgaagtaatgttgttgaggaaggaagagaatgcacaaaaggagaaaattgttggaagacctttgtctaaagtggtgctattcacagtgtggttcttagaccagcagcaacagcatcaccttggagcttgttagaaatgcagggtagcatgccccaccccagatcttctgaatcagaatttgcatcttaacaaaatccccagagattttgtatgtacattaccttgtcacttttaatgtgcatccatctgtgaaattagccgtagattatgaaaacagagtatgtgagaattgtaatccctctattgtaatctatggctaattcatgaaagtaaatgtgtgataatttaatttttatatattagagcagattcaaagttgagattcatgttttctatcacatctacatacttacatatatacctgtagattgtgtagggaagagggaatttacagctacagagctgtgtctccccagtgaatgtcatctattgtatgtccaatggaggaagtgttgagagcttctgcccaaaataaggataatactaaaggtattggcagattctacaaggctcaatttttaagtctcatgtccttcataaagtatttcccatattaccttaaggctacaatacagtcttcattttcagcatccacagtccatcttgtgtgtggcactcattcagtccaatgttttattttccccgtatccattgcttgtcacctaggacggattctaatttctccagtcaccacaacaccaaacagggccttgcatgggtcagagtgttcaaaataccatttattgacaaatgcatcaaaatcaacaaaaaaccagaatatagtcccaaaagagaaatccaccaagtaccataactgaccaaataatgactcaaattaactggaaagaacaaggactggttcataggcaggactttagattttttttgctgtaagtgattttttctctctttttaaaaatgaggttacacaatattaattaataagcaaatcagagtatgctaagcatttaatatgtatgatcttgtttaaaccttttaacagcccaggaaaattggttttattattcctatgttatacatgagacagttaaaattccaagagattaaataagctgagcaaggtcatatttcataaaatgcaagcattctaaaccctatgtggagaaagaatcttatctatcccaaagtgaattgtctactttgtgtagatctatggcatcagtttaacttatgttgccttcttagccctgtgtaacaggttctattgctagttggtatttgttcacaagataaaaattaattttaatattattttgaagcaaatataattatttaggaaaatctacccaaaatataggcatgcaccaaactccagcacccaataaaaagcagcagtaattgatttccattgtgaatggcctgtattcttctacattggcatggactatccagtttacttctgtttacatctggagtattttcaactttgacctagaaatacactgatcaccatttcactcctcatctttagatttcagttgccaatggcaaccttgaattacaaagttgaacaaaagctgcattttacttgagtggtttgtaattttgaacttgagttcatgttttctaggagttgtttgtctataggtgtcagtcctgcccttggttgccgaggaacccgaacattctgaatttgctatgcctctgctgggactcagtgggctttatcagtttctgaacagtttttgctttaaattattgggactgggtactcaattcacaggggtaatatgaatttggaaactgcactcattcatgggtttctaattccctttgtggatgtttttcctcaatgtgctccatgaatcatttgcttccttgcctcatctccaaggttgtggattgggttttcctagttcccatttgaagggtgggcacccctggctctattcagggacttcaggttcagcactccaacacccggcatcctgaggcctcctcttccaatctctcctcgccccgcaaaatggagaatcaattctgttaactgtgagttcctttgttatttctgcgacttaaggatttcttttccttatattcaaactcagctgtaaacttaagtgaatatgtatgtactgtttcattttgcctttccctatgtttggaatagaaaaggaaattttcagtcagccatattgactcaaagtcccatggcaatttattctaaggaaacttagtggaaaacaaataaacaaacaaaaactgaaatggttaggatatagcatgtggtcactttccaacaatccttgggtaacatgactaacctcagtctataaatttcttatgatcctgttatttttattcttgaagcaaaattcatgagattattctaaaaataagatgaggccttgcacgtttgctcaggcttaattttgaaaccattcattctatgaatgtatgattttaatgcatttcccattgcttttaatatccacttagctaactgatgatgttgaggttaaaatactatagtccttgcagtaattctcgtaaaattgtcctagtcactgtatcccacattcagagttctacatttttcttttttgtattttatagaaattatattagattttgttttcattttagaatgctatttttatgctaaaaatgaaataatcacattaccataaaagtgagaaatagaataaataaagatactcataattctaacacagtttatattttagtgtttcttttcaaagtcgttttgtattctttaaaaaaatggtcatagttattatcacagtatgtatacaactataggtacattttttcacttatcacaaaaatataattatttctccctgttttcaaagccattggtttatattatttgactacctcatagttctttaagtgagagccttatgatttttttacagaaacacttacgttttattcatgtttttgctgtttcttggcttttttgttagttttactattttccctgatctttagcagtaaattccaaaatattctgagcaagataattagagtaccatattattattgctgcctctcaaaggctaggagatatatttttaaagtgttaaaagactataaggaattaaattttaaatatatgcagcatgtattttacatctcagaattgctaagcgattaaatttcaaatgttctcaccacaaaaaatggtaagtatttgaggtgataaatatgttaattggctttatttaattactccatgttgtatttataaatcatggcatcattctgtactacataaatacatacaattttaaattgtcaattttatttatatatatgtgtatgtacacacacacacacacacacacacacacacgcacaacagatgctcccagagaagaaaaagaataaaataattgaaaatgtctactgagaaaacaaactgaaacaagtgatcctatgtctatatttaaggtaacataaccatacaaagaatataattactttcagtgaattttggcagagtaatataattgtgcatccttagtaggatatatttgatgaataaaaagaacttcaaaaaagtctcaagcttcatttgcttattttattgacaggtcataatattgaaactatttctggatatattaatataaagcaaataaataaatatgctaatgctatctgaaagcaacctttttaggaaacgtatgcttcagtctttatgggtgaaatgtcatgatgcctgaaacattttcaaatgactcagcaaaaaatatagagatagacaatacataatgcatatgtggcaaaacattgaaattaaggtagttttcacaggctggttttgttttgttttattttttggttgctttgcctgtacaaacaatgctaaatcaatgctatttttcctgtacaaaaataaatatcttagtgtattcattcttatatgttggtggttttgtttctgtgggccaaattcccaaaaatggagttgctgggttacaagcctatgtttgccttcttataaattttgtcaaattattgcccaatgtttcaaagtgtcaatttctcagaatgttattgcttctttaaaggaaatttcttttaaatttaatgaattaaattaaattaatcaatataataaatgtcccttgaaaaggtattgtgctattgcatttctctaattgttaatgagctgctttcatctatatttcaaatatatatagttgtattgtatatatattctttgtattttatttcttttcctatgaattgctttatttatgctcatttttcagagaaatggattattttcatctagataaagatatctatatttttctttcttatgtttttctgtcttgcttaaaaaggtctctgtaccccatgattatacagttattcacaatcacaattatacttttggcacattctcctagacagaagcaaataacaagcaaataacaatcctaagattgttattggcttcatattttatattacaaagtggtatatatactatacgtagtatatataatatacataatataaatattaatatatgtaatacattatattaatttattatgtttatattataaaatatttatataacatataaaatatttttatatataaatataatatattaatatttatattataaaatacattggccttatattttatattaagatctttcatacacttcattgggcaaaatgacctgagttggactctggaattccaaattttgaaaaccttgcaaatatctgtctgcacattatccagctgcatatttttttttaagttttctcaattcttctttgttattccattgtggcttattgttctctggtttcaatttgtttccttaggaaattggtttgattgtctctgattcataactcagtaatctgtcttatatttatgccacatttatgttatactgggttttgtttgtttgttttctgattgtaagctaaccttcaagagtaactttgcttgctccttggccttcacttattttttttatctaaaagctttccttaactatatcaaatctctgccttttttaaagacagaagaaaagaatgtcagagtcagaaaagcatcccaagtacaaaaatctttgacaacacaggaagaattgaatacatttgaacttgaccgtattgccttttcctgcttaactacccagagttcacaaaaatgactagtgggcaatgtcttttgaaaatcaagttaactgagaaatttagaatttgagcctgactagtcaaattaaagaactgggcctataataaaacaaactctgacaacactcttctttattaatatctgagtataataataacaactcatcttaaatttagaggttaaattcaatcatgttctttcgtctttcttgttcattttccaaaaagaggtcttatgaacttaagattaaacaaactcaagtttgacaatgttatgctagaaaggctccaaggcatagcctacaaaatcacatttgtcttgaaaatctatctgtcctgtggtgattttttttccaagaatatgctttgaggccacagcaatgaaaggatggggccagctgtgttagcttatgagtattttatgggtccaggccacataatgagactactttctgttcccctcactcaaagttatagccataatactgctgcctaacaaccaaccataaaaatcagtcacaaaacaagcatttgctaagttgatgagtctatgaactggttctggtctggaccaggctcacctgatctcagtaggcttgttcatgcctgtgtttagctggtggtcagctaggggtgagctggtttagaatagcttcacttttatatctgatagtcaattgaagtgatgcaaaaagtataataactgggccatgtgtctcctcttctggcaagctaggctgagcttgttcacatgatggctgagtaaacttctaactgtgagagcagaagcacacaaggccttgtgacgtctggactcagaacagcatatacttttgacacattctcctagacagaaccaaataacaaggcctccccagattcaagaagatgagaaatacactccgttctttgctgggatgggatgagctgcaaagtcacaccacaaaggttatgattacaaggaggggtgaagaattactgccatttgcacgaccaatctaccattcccacctaacaccttgtttcacttgcacagaatagaaattcaacacatattagagtacaaaacccagaatatggcaattagatagtatgatgctgaacctcagaacagaggcaatcaaaaggaagccctggtgatctgtggaggaccatctaagcctaggattatggggaaggaaaattaggaagaatctaaactggaattccacagttggacctaacttcgggagtcccctggttaaagccagatttaaatctgttaggggaaaggttataaattctccatgagcccagtggggctgatgaatgtgatttgaattgattgccaacaataaaaactcaggctcttacatgaagatgtggatttctgacttcaatatttaatctgacaagcatcagctagaactgagttgtttgtactccctttagacagggcctgtcatctctagctcttcagaaaccccacaaccccctctttcttgcacatagcctgctacttatttacatgacttgcctggcccctgtaacatctgagtttgcaacccttgggctggaatagctctagaccactgatggatggggctttgttggaacggagccagaattaccctgtattcttttcatattttcttacaatgaacaagtatttagtttataagaagaaaaagcaaaagctctaacttggaatgtaataaatacaattttgaaattagttcattaataattgtatggctgtttaaaaagagtgaaatatatggcacttaatatgtcatgaagcagtgacttagtttagaatataataaaatctactactatcccatgatgaaagtctactacagttataacttagccacaactgggtcaattattataaattattaaaaatcatcatcaaaattaaattactaaaatgtaggtttttcttagaattaaattatttaaaatgttaaaaagcattggtttaggtatttgacattttcttgtattttacttcttttgttaataattaaagaaatagtacttatcaagcactatggggtcttgtccaccaatgagcattaacctgagagaaattatctgctaggtcaggtacaatatatccatagctgaaggtcccccagttcaacctataagagaacaacaatctgttgttttcttaaaacaggctcacttgcttttcttccttccctatcttccttggaaacacatgtgttactgaattaaaattgaggtgaattgatgatgaggtctgaatggtagtaaatggacgctgtcaaacaacaggctaagatttcattcatgcaaaagagtacgacattgtaaaagccccacttccttctaaattgttggaacagcagggaaataactggcaattgtcttcttcctgtttgatgccccagtgactcgtatgtgccaacacggagagtagggccctgtacaaggtgctccatcatagccacatgagtccagggccctgagcgccccctcacagcatgtttcctcctcggcttataagaatttatatgctagcaaatagattcataaataccccacattttatatgtagggagaatagttgactttcaatactcagcctaagccatttttaccagataccatttttatttttattttttcattttctatttttatttatttttatttttctttgatatttcaataatttttataaatttttaaaaatttcaacttttattttagattcagaaggtacatgtacaggtttgttacatgagtatattgtgtaacatatatgtatgagtatattgtgctgaggtttgggatacgaatgatcctgtcacaaaaataataaacatagtacccagcaattagtttttcaaggcttgcccccgactccctcccccactttattagtccccagtgtcaatcattgccatatttatgtccatgaatacccaatgtttagctcccacttataagtgagactgtgtggtatttggttttctgttcctacattaatttgcttaggataatggcctccagctgcatccatgttgctgcaaaggacatgatttcatactttttatggctgcctactattccacattataagtaccatattttctttatccagtccaccattaatgggcacctaggttgattgaatgtctttgctattgtgaatagtgctatgataaacatacaagtgcatgtcacacactttttgatgtgaaaaaaaaaaaaaaacaagtcatttaaactagatccataatctgttatctgagattcttggggcctgttgtttttcagaattttaacttttctgattttagaaaggcaatgtgatgcatataccatgagcataacactccaggcagacctgagtaatcctcaaaatcaaacaaattaatatgtctgcagttaagttcatgtatagtcatatgacagggcatacatgaaattatacatatttcatgtatcagtatcatcccaatatcagttcatgtcaatgagtctgccacaaatttgccagaaaaagaaaaagaaaaagaaaaaaaggaaacttctcggatttcagaactttgggatagataagggattacttaatataaattaaataatttagtaatggcaaaatttatctgtcacagaagtgagagtgaaaggagttgaactaaaggggatgctcccaagctgctgacactgtctagaaggaggctaagactcaggaagacagatgtcctggagattgacttcaccctggcattccagggatcagaacaagccccagaggctgccctgaaagctgcagatggaggatgcacagccaggatcaagacaaaaagtagaactgggggctgagagtagaacccagacagggagctatcagagtggccaaagcagattaaccaccttggcatcccccaagagctattgagaaacgcaggagctcaggccccactcaggcctcctgagtcggacagaatcaagatcaaattccagacgatttgtgtgcacttaaagtttgaaaagcagggggaaaaatacaggttttaagtccatgtcttaaaaattgcctccaagctaataaggaggtgtgggggaagcatttaaccttgcatggtgtttcaaggattattctccctgctcaccaattgataagcagagataattttctttaaaattcaaggttttctcttggactcagcacagcacagctccctaccagacaactctccctgttgcccccgttctctccctgtctaccggagaatcccagcttttatattattttatgactaagacatccacgtaagtctccatttgaagaaaggcttccaggactttaaaacatctgaaaattctccagggcataaaatagacacattaagagacagtttaaagggtagctaaaatagtttacaaggcaaataaaaattagaatgaaaaatgaatcaaaataaagtggtggcaaaataagtcaaaataaaagttcaagttggttacacgagtttgtttactttgtgaaaatgtatcaagctgctccttagaccccagcattggcttccaggcctctgactaaagctgcacatctcaaagtccactccacactgctctgtctattctactcagcttcttagcttcccccagccaggttcatggctgaccttggaacgctcacctatcaatatttctcaacccctaaatgtaagaacctcagatcattttatattatttctgacacatttttctatttttctttctttcttttcctctttttctttctttctttttttttttttttttttttttggttttgagatggagtctcactctgtcgcccagactggagtgcactggcgcgatctcagctcaccacaaccactgcctcctgggttcaagcgattctcctgccccagcctcccaagtaggtgggatcacaggtgcacgctaccatacctagctaatttttgtattttagtagggatggagtttcaccatgttggctaggctggtcttaaactcctgacctcaagcaatccacctgcttcaacctcccaaagtgctgggatcacagccgcacgccactatacccagctcatttttgtattttagtagagatggagtttcaccccatgctggtcttaaactcctgacctcaagcaatcgcaatcaacctgcctcaacctcaacctcccaaagtgctgggattacacgtgtgagccaccacgcccagactctgacacctttttcaaaagacccgtgtgtgtgtgtgtgtgtgtgtgtgtgtgtgcatttgtagataccgctattcatcttattctgagtctttagccttattgtgccacacataacttgaagttgactttcagctacagacaaatgatgtgtccaactaaactttgttacatctcctctataggtgaccagtgaatgatattttaagttaatgtattcatcagccccttttgtatatctctttcagagagtttctatgggagtgggtatagaaacataaacaacttcaagtcatctcccctcttgatgtctctcagctgcaggtggagctggagcaagaataccaagacaaattcaaaagactgcccctcgagattttggaattcgtgcaggaagccatgaaaggaaagatcagtgaagacagcaatcacggttctgcccctctctccctgtcctcagaccctggaaaagtgaaccacaagactccctccagtgaggagctgggaggagacatcccaggaaaagaatttgatactcctctgtgaatgctcctgccaggccttcagaaattgcatggccactccagcgtcatcggactctctcttattacaaagatcactgcccaggaccatcttcccgagaagcatcccttagcctaaaatccacaccaaagggagagttccagaggaatccatgaagaattcccatgcccaggctccatgtgtcatgtggaaacctccacaggtctgctagtgaagaatgcatgtatgtgagatttttgttttctttccaatagcaaattcaaagcaagcaacttgcaggctccatggaacttttaatgaaggacagtgtcttctttgaagaaaatcaagctcgtgtttttattcgaagctctggtgtaaaatatttcaaagtcatagaaatagtttgagaaatgcatagcattatttaacactattgaacagccgactttgagcattgtttcttctaactgcccctcaactaccattatcttcaagtcaacatgcatattacattttcatcctttgctttgcaagcactggtggcttgcagtttgctaatttatttatcatagagtcatcaatgtatttgttgctgacatggttttattagatactgtagtgattcaaataagttttctatttgaaaaaaaaaatcacttgattgtatccttgcccagtgaagccatcctaagacttagcaatatggattgtacatttggctgcatgagcaagtcggccgcacacttccagacagtgtgctgtttgaattgactatttgcactcaaagtctgggtattcattggttattggcctgaaatgatcaaataactacaaatgatctgttgaataaaaatagttgagctgatatatgttaagcagatattcaatcagaatgaacaggttccggtggttattttgccgtttgacattttttatggttcatttatttttaatatagagaggaagattgaatatttatctagagaatacaaagacccacatgtaaatgataggtattatctccatgtatatatgtacccacttagtcatgtaagtgcatatacacatacacacacatgagtgtagacatgtgtttattaattgacaatgacccaaatctcttccacaagacttaaaaccaaattcagggacaaatggatagagaagaaaagggtcaaacatcgagattacatggatgttaaattatatggagacgctaagaaataattgatggagccattgatgcaaaccgaagtagatttagaacttatatgaatttgatttatattttgcaagatcaaaaattagatgttaagtatcagattttaagcttgttttaatggtcaaaaaattaggacagaaataatatggacatttattagtatcttccataatttttaagtctgacacatttctattttattctaacataaaaaaacttccattatatatttactaagtatatttaattcacttaactctgtctttataagttcctattttagatggaataagagaaacaaattatatcaaggtaaaactgatcaaaagcataattgaaagttctgaaaaaagaaaaataataatatgtagaaaaatgtaacttagagagtaacacatgaacattgaagttaaaacccagaagccagatgctcacagttttattttactttaaaataaacctgtctgactgtagctttgcgaaatatcttaaaacgcaaaaaccagttgtgtcctgaaaattgtttcaagaatttaatatttttatgaaaattattttatttaactttaagcaataactagagattacaattaaattttaatcaaaatgaaggcttagttcaaacataaggaaacagtgtttgattaaaaaaaacacatctagtaagacgtaaggggaaaatcacatcctctttggagatgattatattttgatctgaagggtttggggtgttcattagacacttaataaaacttaacttccaatgaaaaagaaatcttttgtaaatcattctacttttgcactttgaaagaaaggcgttaatcataaagaagcaagaatggtcaaaatcgaatgctgcatttttataaacaaaattacagactgtctgaaattgaagaagaatgaactaataatagcattcataaccaaacacaatgatgattattgcagaacattgtatcacattttagtccagagatagaataaagttgaataaccttgacttacacaaaactgttttggtagttggatttcattatcttagtgaatttagtcattttacaatatgtttgtatttggccatttactgtaatcacatttttatatctgtacaatgacactttttgcagttgtggggtagtgtgtaacactgtccatcttgcatcattgaaactactacaatgatactatcatttaataatattaatattacttgaaatagactaagataaagaaaaggggtctgtatgatgtgcagttttgtgcctttatgtatttgccttgttctttgtcgaatgtgtgaaattccgtactgtggtttttcctataatagaaagtagagctgtgtattaaattagactgtgtctctctgatacctttacactactgagaatagcatggttttggccatgtaaaccaattttcaaagttctaatgacatagccatgtgtttttggttttttatatttcattttaaaatttgagtatcaccatacattaattaatactcctgtagtagataagctgtcattaagtaattcccaaaaaaagggccatttgcttgcattactttgaatttaatgttgcgcttgtgcactgtgttaatattgtttgtgatggattggacgttgtgactcttgccttttaagaagaaaaaaaagataggacaaagtatttgaagctcttaaaatgtacatattttggttcttctatctcaaattatttaaaatgcataattcacatttttgtaataattctatgcaattttgtggcatgatgtttcttccacttgtaattttatgtgctttcatcacaaatccaaaggaaagaataaaaatttcttaacacaa

SEQ ID NO: 460 - DNA, 7138 bp, Homo Sapiens
tctgtgtatagaggatgtgctgaatggtgcgctttgaggcggcggcggcggaggagcagaatccgccgcgactggcagcctcggctgaccggctcggcttctcttcgccttccgaggctcctcatccaccgcgggctccagacctcgcgtcccgcccggggcatggccgggcgctgcgcccccgcgcgctctgcctgctgagcggcgccggagggaggtgcggaggccgggaggccggggaggccggcggggagcagagtcgagcgcctccggagcagagaaaggagcccgcgccccgcgccccgcgccccgcgcacggtccccagtccctgccgcgctcgcccgggccgcccggagcccagatgagcccagatggccggggctcaacccggagtgcacgccttgcaactcaagcccgtgtgcgtgtccgacagcctcaagaagggcaccaaattcgtcaagtgggatgatgactcaactattgttactccaattattttgaggactgaccctcagggatttttcttttactggacagatcaaaacaaggagacagagctactggatctcagccttgtcaaagatgccagatgtgggagacacgccaaagctcccaaggaccccaaattacgtgaacttttggatgtggggaacatcgggcgcctggagcagcgcatgatcacagtggtgtatgggcctgacctcgtgaacatctcccatttgaatctcgtggctttccaagaagaagtggccaaggaatggacaaatgaggttttcagtttggcaacaaacctgctggcccaaaacatgtccagggatgcatttctggaaaaagcctatactaaacttaagctgcaagtcactccagaagggcgtattcctctcaaaaacatatatcgcttgttttcagcagatcggaagcgagttgaaactgctttagaggcttgtagtcttccatcttcaaggaatgattcaatacctcaagaagatttcactccagaagtgtacagagttttcctcaacaacctttgccctcgacctgaaattgataacatcttttcagaatttggtgcaaaaagcaaaccatatcttaccgttgatcagatgatggattttatcaaccttaagcagcgagatcctcggcttaatgaaatactttatccacctctaaaacaagagcaagtccaagtattgattgagaagtatgaacccaacaacagcctcgccagaaaaggacaaatatcagtggatgggttcatgcgctatctgagtggagaagaaaacggagtcgtttcacctgagaaactggatttgaatgaagacatgtctcagcccctttctcactatttcattaattcctcgcacaacacctacctcacagctggccaactggctggaaactcctctgttgagatgtatcgccaagtgctcctgtctggttgtcgctgtgtggagctggactgctggaagggacggactgcagaagaggaacctgtcatcacccatggcttcaccatgacaactgaaatatctttcaaggaagtgatagaagcaattgcggagtgtgcatttaagacttcaccttttccaattctcctttcgtttgagaaccatgtggattccccaaagcagcaagccaagatggcggagtactgccgactgatctttggggatgcccttctcatggagcccctggaaaaatatccactggaatctggagttcctcttccaagccctatggatttaatgtataaaattttggtgaaaaataagaagaaatcacacaagtcatcagaaggaagcggcaaaaagaagctctcagaacaagcctccaacacctacagtgactcctccagcatgttcgagccctcatccccaggagccggagaagctgatacggaaagtgacgacgacgatgatgatgatgactgtaaaaaatcttcaatggatgaggggactgctggaagtgaggctatggccacagaagaaatgtctaatctggtgaactatattcagccagtcaagtttgagtcatttgaaatttcaaaaaaaagaaataaaagttttgaaatgtcttccttcgtggaaaccaaaggacttgaacaactcaccaagtctccagtggaatttgtagaatataacaaaatgcagcttagcaggatatatccaaaaggaacacgtgtggattcatccaactatatgcctcagctcttctggaatgcaggttgtcagatggtggcacttaatttccagacaatggacctggctatgcaaataaatatggggatgtatgaatacaacgggaagagtggctacagattgaagccagagttcatgaggaggcctgacaagcattttgatccatttactgaaggcatcgtagatgggatagtggcaaacactttgtctgttaagattatttcaggtcagtttctttctgataagaaagttgggacttacgtggaagtagatatgtttggtttgcctgtggatacaaggaggaaggcatttaagaccaaaacatcccaaggaaatgctgtgaatcctgtctgggaagaagaacctattgtgttcaaaaaggtggttcttcctactctggcctgtttgagaatagcagtttatgaagaaggaggtaaattcattggccaccgtatcttgccagtgcaagccattcggccaggctatcactatatctgtctaaggaatgaaaggaaccagcctctgacgctgcctgctgtctttgtctacatagaagtgaaagactatgtgccagacacatatgcagatgtcatcgaagctttatcaaacccaatccgatatgtgaacctgatggaacagagagctaagcaattggctgctttgacactggaagatgaagaagaagtaaagaaagaggctgatcctggagaaacaccatcagaggctccaagtgaagcgagaacgactccagcagaaaatggggtgaatcacactacaaccctgacacccaagccaccctcccaggctctccacagccagccagctccaggttctgtaaaggcacctgccaaaacagaagatcttattcagagtgtcttaacagaagtggaagcacagaccatcgaagaactaaagcaacagaaatcgtttgtgaaacttcaaaagaaacactacaaagaaatgaaagacctggttaagagacaccacaagaaaaccactgaccttatcaaagaacacactaccaagtataatgaaattcagaatgactacttgagaaggagagccgctttggaaaagtccgccaaaaaggacagtaagaaaaaatcggaacccagcagccctgatcatggttcatcaacgattgagcaagacctcgctgctctggatgctgaaatgacccaaaagttaatagacttgaaggacaaacaacagcagcagctgcttaatcttcggcaagaacagtattatagtgaaaaataccagaagcgagaacatattaaactgcttattcaaaagttgacggatgtcgcagaagagtgtcagaacaatcagttaaagaagctcaaagaaatctgtgagaaagaaaagaaagaattaaagaagaaaatggataaaaagaggcaggagaagataacagaagctaaatccaaagacaaaagtcagatggaagaggagaagacagagatgatccggtcatatatccaggaagtggtgcagtatatcaagaggctagaagaagcgcaaagtaaacggcaagaaaaactcgtagagaaacacaaggaaatacgtcagcagatcctggatgaaaagcccaagggggaaggttcctcctcattcttgtcggaaacttgccatgaggatccctctgtttcccccaactttactccccccaaccctcaagctctcaagtggtgaccaccgtccttccggccagctgcaggtggagctggagcaagaataccaagacaaattcaaaagactgcccctcgagattttggaattcgtgcaggaagccatgaaaggaaagatcagtgaagacagcaatcacggttctgcccctctctccctgtcctcagaccctggaaaagtgaaccacaagactccctccagtgaggagctgggaggagacatcccaggaaaagaatttgatactcctctgtgaatgctcctgccaggccttcagaaattgcatggccactccagcgtcatcggactctctcttattacaaagatcactgcccaggaccatcttcccgagaagcatcccttagcctaaaatccacaccaaagggagagttccagaggaatccatgaagaattcccatgcccaggctccatgtgtcatgtggaaacctccacaggtctgctagtgaagaatgcatgtatgtgagatttttgttttctttccaatagcaaattcaaagcaagcaacttgcaggctccatggaacttttaatgaaggacagtgtcttctttgaagaaaatcaagctcgtgtttttattcgaagctctggtgtaaaatatttcaaagtcatagaaatagtttgagaaatgcatagcattatttaacactattgaacagccgactttgagcattgtttcttctaactgcccctcaactaccattatcttcaagtcaacatgcatattacattttcatcctttgctttgcaagcactggtggcttgcagtttgctaatttatttatcatagagtcatcaatgtatttgttgctgacatggttttattagatactgtagtgattcaaataagttttctatttgaaaaaaaaaatcacttgattgtatccttgcccagtgaagccatcctaagacttagcaatatggattgtacatttggctgcatgagcaagtcggccgcacacttccagacagtgtgctgtttgaattgactatttgcactcaaagtctgggtattcattggttattggcctgaaatgatcaaataactacaaatgatctgttgagttccggtggttattttgccgtttgacattttttatggttcatttatttttaatatagagaggaagattgaatatttatctagagaatacaaagacccacatgtaaatgataggtattatctccatgtatatatgtacccacttagtcatgtaagtgcatatacacatacacacacatgagtgtagacatgtgtttattaattgacaatgacccaaatctcttccacaagacttaaaaccaaattcagggacaaatggatagagaagaaaagggtcaaacatcgagattacatggatgttaaattatatggagacgctaagaaataattgatggagccattgatgcaaaccgaagtagatttagaacttatatgaatttgatttatattttgcaagatcaaaaattagatgttaagtatcagattttaagcttgttttaatggtcaaaaaattaggacagaaataatatggacatttattagtatcttccataatttttaagtctgacacatttctattttattctaacataaaaaaacttccattatatatttactaagtatatttaattcacttaactctgtctttataagttcctattttagatggaataagagaaacaaattatatcaaggtaaaactgatcaaaagcataattgaaagttctgaaaaaagaaaaataataatatgtagaaaaatgtaacttagagagtaacacatgaacattgaagttaaaacccagaagccagatgctcacagttttattttactttaaaataaacctgtctgactgtagctttgcgaaatatcttaaaacgcaaaaaccagttgtgtcctgaaaattgtttcaagaatttaatatttttatgaaaattattttatttaactttaagcaataactagagattacaattaaattttaatcaaaatgaaggcttagttcaaacataaggaaacagtgtttgattaaaaaaaacacatctagtaagacgtaaggggaaaatcacatcctctttggagatgattatattttgatctgaagggtttggggtgttcattagacacttaataaaacttaacttccaatgaaaaagaaatcttttgtaaatcattctacttttgcactttgaaagaaaggcgttaatcataaagaagcaagaatggtcaaaatcgaatgctgcatttttataaacaaaattacagactgtctgaaattgaagaagaatgaactaataatagcattcataaccaaacacaatgatgattattgcagaacattgtatcacattttagtccagagatagaataaagttgaataaccttgacttacacaaaactgttttggtagttggatttcattatcttagtgaatttagtcattttacaatatgtttgtatttggccatttactgtaatcacatttttatatctgtacaatgacactttttgcagttgtggggtagtgtgtaacactgtccatcttgcatcattgaaactactacaatgatactatcatttaataatattaatattacttgaaatagactaagataaagaaaaggggtctgtatgatgtgcagttttgtgcctttatgtatttgccttgttctttgtcgaatgtgtgaaattccgtactgtggtttttcctataatagaaagtagagctgtgtattaaattagactgtgtctctctgatacctttacactactgagaatagcatggttttggccatgtaaaccaattttcaaagttctaatgacatagccatgtgtttttggttttttatatttcattttaaaatttgagtatcaccatacattaattaatactcctgtagtagataagctgtcattaagtaattcccaaaaaaagggccatttgcttgcattactttgaatttaatgttgcgcttgtgcactgtgttaatattgtttgtgatggattggacgttgtgactcttgccttttaagaagaaaaaaaagataggacaaagtatttgaagctcttaaaatgtacatattttggttcttctatctcaaattatttaaaatgcataattcacatttttgtaataattctatgcaattttgtggcatgatgtttcttccacttgtaattttatgtgctttcatcacaaatccaaaggaaagaataaaaatttcttaacacaa

SEQ ID NO: 461 - protein, 1173 aa, Homo Sapiens
MAGAQPGVHALQLKPVCVSDSLKKGTKFVKWDDDSTIVTPIILRTDPQGFFFYWTDQNKETELLDLSLVKDARCGRHAKAPKDPKLRELLDVGNIGRLEQRMITVVYGPDLVNISHLNLVAFQEEVAKEWTNEVFSLATNLLAQNMSRDAFLEKAYTKLKLQVTPEGRIPLKNIYRLFSADRKRVETALEACSLPSSRNDSIPQEDFTPEVYRVFLNNLCPRPEIDNIFSEFGAKSKPYLTVDQMMDFINLKQRDPRLNEILYPPLKQEQVQVLIEKYEPNNSLARKGQISVDGFMRYLSGEENGVVSPEKLDLNEDMSQPLSHYFINSSHNTYLTAGQLAGNSSVEMYRQVLLSGCRCVELDCWKGRTAEEEPVITHGFTMTTEISFKEVIEAIAECAFKTSPFPILLSFENHVDSPKQQAKMAEYCRLIFGDALLMEPLEKYPLESGVPLPSPMDLMYKILVKNKKKSHKSSEGSGKKKLSEQASNTYSDSSSMFEPSSPGAGEADTESDDDDDDDDCKKSSMDEGTAGSEAMATEEMSNLVNYIQPVKFESFEISKKRNKSFEMSSFVETKGLEQLTKSPVEFVEYNKMQLSRIYPKGTRVDSSNYMPQLFWNAGCQMVALNFQTMDLAMQINMGMYEYNGKSGYRLKPEFMRRPDKHFDPFTEGIVDGIVANTLSVKIISGQFLSDKKVGTYVEVDMFGLPVDTRRKAFKTKTSQGNAVNPVWEEEPIVFKKVVLPTLACLRIAVYEEGGKFIGHRILPVQAIRPGYHYICLRNERNQPLTLPAVFVYIEVKDYVPDTYADVIEALSNPIRYVNLMEQRAKQLAALTLEDEEEVKKEADPGETPSEAPSEARTTPAENGVNHTTTLTPKPPSQALHSQPAPGSVKAPAKTEDLIQSVLTEVEAQTIEELKQQKSFVKLQKKHYKEMKDLVKRHHKKTTDLIKEHTTKYNEIQNDYLRRRAALEKSAKKDSKKKSEPSSPDHGSSTIEQDLAALDAEMTQKLIDLKDKQQQQLLNLRQEQYYSEKYQKREHIKLLIQKLTDVAEECQNNQLKKLKEICEKEKKELKKKMDKKRQEKITEAKSKDKSQMEEEKTEMIRSYIQEVVQYIKRLEEAQSKRQEKLVEKHKEIRQQILDEKPKGEGSSSFLSETCHEDPSVSPNFTPPNPQALKW

SEQ ID NO: 462 - DNA, 7074 bp, Homo Sapiens
tctgtgtatagaggatgtgctgaatggtgcgctttgaggcggcggcggcggaggagcagaatccgccgcgactggcagcctcggctgaccggctcggcttctcttcgccttccgaggctcctcatccaccgcgggctccagacctcgcgtcccgcccggggcatggccgggcgctgcgcccccgcgcgctctgcctgctgagcggcgccggagggaggtgcggaggccgggaggccggggaggccggcggggagcagagtcgagcgcctccggagcagagaaaggagcccgcgccccgcgccccgcgccccgcgcacggtccccagtccctgccgcgctcgcccgggccgcccggagcccagatgagcccagatggccggggctcaacccggagtgcacgccttgcaactcaagcccgtgtgcgtgtccgacagcctcaagaagggcaccaaattcgtcaagtgggatgatgactcaactattgttactccaattattttgaggactgaccctcagggatttttcttttactggacagatcaaaacaaggagacagagctactggatctcagccttgtcaaagatgccagatgtgggagacacgccaaagctcccaaggaccccaaattacgtgaacttttggatgtggggaacatcgggcgcctggagcagcgcatgatcacagtggtgtatgggcctgacctcgtgaacatctcccatttgaatctcgtggctttccaagaagaagtggccaaggaatggacaaatgaggttttcagtttggcaacaaacctgctggcccaaaacatgtccagggatgcatttctggaaaaagcctatactaaacttaagctgcaagtcactccagaagggcgtattcctctcaaaaacatatatcgcttgttttcagcagatcggaagcgagttgaaactgctttagaggcttgtagtcttccatcttcaaggaatgattcaatacctcaagaagatttcactccagaagtgtacagagttttcctcaacaacctttgccctcgacctgaaattgataacatcttttcagaatttggtgcaaaaagcaaaccatatcttaccgttgatcagatgatggattttatcaaccttaagcagcgagatcctcggcttaatgaaatactttatccacctctaaaacaagagcaagtccaagtattgattgagaagtatgaacccaacaacagcctcgccagaaaaggacaaatatcagtggatgggttcatgcgctatctgagtggagaagaaaacggagtcgtttcacctgagaaactggatttgaatgaagacatgtctcagcccctttctcactatttcattaattcctcgcacaacacctacctcacagctggccaactggctggaaactcctctgttgagatgtatcgccaagtgctcctgtctggttgtcgctgtgtggagctggactgctggaagggacggactgcagaagaggaacctgtcatcacccatggcttcaccatgacaactgaaatatctttcaaggaagtgatagaagcaattgcggagtgtgcatttaagacttcaccttttccaattctcctttcgtttgagaaccatgtggattccccaaagcagcaagccaagatggcggagtactgccgactgatctttggggatgcccttctcatggagcccctggaaaaatatccactggaatctggagttcctcttccaagccctatggatttaatgtataaaattttggtgaaaaataagaagaaatcacacaagtcatcagaaggaagcggcaaaaagaagctctcagaacaagcctccaacacctacagtgactcctccagcatgttcgagccctcatccccaggagccggagaagctgatacggaaagtgacgacgacgatgatgatgatgactgtaaaaaatcttcaatggatgaggggactgctggaagtgaggctatggccacagaagaaatgtctaatctggtgaactatattcagccagtcaagtttgagtcatttgaaatttcaaaaaaaagaaataaaagttttgaaatgtcttccttcgtggaaaccaaaggacttgaacaactcaccaagtctccagtggaatttgtagaatataacaaaatgcagcttagcaggatatatccaaaaggaacacgtgtggattcatccaactatatgcctcagctcttctggaatgcaggttgtcagatggtggcacttaatttccagacaatggacctggctatgcaaataaatatggggatgtatgaatacaacgggaagagtggctacagattgaagccagagttcatgaggaggcctgacaagcattttgatccatttactgaaggcatcgtagatgggatagtggcaaacactttgtctgttaagattatttcaggtcagtttctttctgataagaaagttgggacttacgtggaagtagatatgtttggtttgcctgtggatacaaggaggaaggcatttaagaccaaaacatcccaaggaaatgctgtgaatcctgtctgggaagaagaacctattgtgttcaaaaaggtggttcttcctactctggcctgtttgagaatagcagtttatgaagaaggaggtaaattcattggccaccgtatcttgccagtgcaagccattcggccaggctatcactatatctgtctaaggaatgaaaggaaccagcctctgacgctgcctgctgtctttgtctacatagaagtgaaagactatgtgccagacacatatgcagatgtcatcgaagctttatcaaacccaatccgatatgtgaacctgatggaacagagagctaagcaattggctgctttgacactggaagatgaagaagaagtaaagaaagaggctgatcctggagaaacaccatcagaggctccaagtgaagcgagaacgactccagcagaaaatggggtgaatcacactacaaccctgacacccaagccaccctcccaggctctccacagccagccagctccaggttctgtaaaggcacctgccaaaacagaagatcttattcagagtgtcttaacagaagtggaagcacagaccatcgaagaactaaagcaacagaaatcgtttgtgaaacttcaaaagaaacactacaaagaaatgaaagacctggttaagagacaccacaagaaaaccactgaccttatcaaagaacacactaccaagtataatgaaattcagaatgactacttgagaaggagagccgctttggaaaagtccgccaaaaaggacagtaagaaaaaatcggaacccagcagccctgatcatggttcatcaacgattgagcaagacctcgctgctctggatgctgaaatgacccaaaagttaatagacttgaaggacaaacaacagcagcagctgcttaatcttcggcaagaacagtattatagtgaaaaataccagaagcgagaacatattaaactgcttattcaaaagttgacggatgtcgcagaagagtgtcagaacaatcagttaaagaagctcaaagaaatctgtgagaaagaaaagaaagaattaaagaagaaaatggataaaaagaggcaggagaagataacagaagctaaatccaaagacaaaagtcagatggaagaggagaagacagagatgatccggtcatatatccaggaagtggtgcagtatatcaagaggctagaagaagcgcaaagtaaacggcaagaaaaactcgtagagaaacacaaggaaatacgtcagcagatcctggatgaaaagcccaagctgcaggtggagctggagcaagaataccaagacaaattcaaaagactgcccctcgagattttggaattcgtgcaggaagccatgaaaggaaagatcagtgaagacagcaatcacggttctgcccctctctccctgtcctcagaccctggaaaagtgaaccacaagactccctccagtgaggagctgggaggagacatcccaggaaaagaatttgatactcctctgtgaatgctcctgccaggccttcagaaattgcatggccactccagcgtcatcggactctctcttattacaaagatcactgcccaggaccatcttcccgagaagcatcccttagcctaaaatccacaccaaagggagagttccagaggaatccatgaagaattcccatgcccaggctccatgtgtcatgtggaaacctccacaggtctgctagtgaagaatgcatgtatgtgagatttttgttttctttccaatagcaaattcaaagcaagcaacttgcaggctccatggaacttttaatgaaggacagtgtcttctttgaagaaaatcaagctcgtgtttttattcgaagctctggtgtaaaatatttcaaagtcatagaaatagtttgagaaatgcatagcattatttaacactattgaacagccgactttgagcattgtttcttctaactgcccctcaactaccattatcttcaagtcaacatgcatattacattttcatcctttgctttgcaagcactggtggcttgcagtttgctaatttatttatcatagagtcatcaatgtatttgttgctgacatggttttattagatactgtagtgattcaaataagttttctatttgaaaaaaaaaatcacttgattgtatccttgcccagtgaagccatcctaagacttagcaatatggattgtacatttggctgcatgagcaagtcggccgcacacttccagacagtgtgctgtttgaattgactatttgcactcaaagtctgggtattcattggttattggcctgaaatgatcaaataactacaaatgatctgttgaataaaaatagttgagctgatatatgttaagcagatattcaatcagaatgaacaggttccggtggttattttgccgtttgacattttttatggttcatttatttttaatatagagaggaagattgaatatttatctagagaatacaaagacccacatgtaaatgataggtattatctccatgtatatatgtacccacttagtcatgtaagtgcatatacacatacacacacatgagtgtagacatgtgtttattaattgacaatgacccaaatctcttccacaagacttaaaaccaaattcagggacaaatggatagagaagaaaagggtcaaacatcgagattacatggatgttaaattatatggagacgctaagaaataattgatggagccattgatgcaaaccgaagtagatttagaacttatatgaatttgatttatattttgcaagatcaaaaattagatgttaagtatcagattttaagcttgttttaatggtcaaaaaattaggacagaaataatatggacatttattagtatcttccataatttttaagtctgacacatttctattttattctaacataaaaaaacttccattatatatttactaagtatatttaattcacttaactctgtctttataagttcctattttagatggaataagagaaacaaattatatcaaggtaaaactgatcaaaagcataattgaaagttctgaaaaaagaaaaataataatatgtagaaaaatgtaacttagagagtaacacatgaacattgaagttaaaacccagaagccagatgctcacagttttattttactttaaaataaacctgtctgactgtagctttgcgaaatatcttaaaacgcaaaaaccagttgtgtcctgaaaattgtttcaagaatttaatatttttatgaaaattattttatttaactttaagcaataactagagattacaattaaattttaatcaaaatgaaggcttagttcaaacataaggaaacagtgtttgattaaaaaaaacacatctagtaagacgtaaggggaaaatcacatcctctttggagatgattatattttgatctgaagggtttggggtgttcattagacacttaataaaacttaacttccaatgaaaaagaaatcttttgtaaatcattctacttttgcactttgaaagaaaggcgttaatcataaagaagcaagaatggtcaaaatcgaatgctgcatttttataaacaaaattacagactgtctgaaattgaagaagaatgaactaataatagcattcataaccaaacacaatgatgattattgcagaacattgtatcacattttagtccagagatagaataaagttgaataaccttgacttacacaaaactgttttggtagttggatttcattatcttagtgaatttagtcattttacaatatgtttgtatttggccatttactgtaatcacatttttatatctgtacaatgacactttttgcagttgtggggtagtgtgtaacactgtccatcttgcatcattgaaactactacaatgatactatcatttaataatattaatattacttgaaatagactaagataaagaaaaggggtctgtatgatgtgcagttttgtgcctttatgtatttgccttgttctttgtcgaatgtgtgaaattccgtactgtggtttttcctataatagaaagtagagctgtgtattaaattagactgtgtctctctgatacctttacactactgagaatagcatggttttggccatgtaaaccaattttcaaagttctaatgacatagccatgtgtttttggttttttatatttcattttaaaatttgagtatcaccatacattaattaatactcctgtagtagataagctgtcattaagtaattcccaaaaaaagggccatttgcttgcattactttgaatttaatgttgcgcttgtgcactgtgttaatattgtttgtgatggattggacgttgtgactcttgccttttaagaagaaaaaaaagataggacaaagtatttgaagctcttaaaatgtacatattttggttcttctatctcaaattatttaaaatgcataattcacatttttgtaataattctatgcaattttgtggcatgatgtttcttccacttgtaattttatgtgctttcatcacaaatccaaaggaaagaataaaaatttcttaacacaa

SEQ ID NO: 463 - protein, 1216 aa, Homo Sapiens
MAGAQPGVHALQLKPVCVSDSLKKGTKFVKWDDDSTIVTPIILRTDPQGFFFYWTDQNKETELLDLSLVKDARCGRHAKAPKDPKLRELLDVGNIGRLEQRMITVVYGPDLVNISHLNLVAFQEEVAKEWTNEVFSLATNLLAQNMSRDAFLEKAYTKLKLQVTPEGRIPLKNIYRLFSADRKRVETALEACSLPSSRNDSIPQEDFTPEVYRVFLNNLCPRPEIDNIFSEFGAKSKPYLTVDQMMDFINLKQRDPRLNEILYPPLKQEQVQVLIEKYEPNNSLARKGQISVDGFMRYLSGEENGVVSPEKLDLNEDMSQPLSHYFINSSHNTYLTAGQLAGNSSVEMYRQVLLSGCRCVELDCWKGRTAEEEPVITHGFTMTTEISFKEVIEAIAECAFKTSPFPILLSFENHVDSPKQQAKMAEYCRLIFGDALLMEPLEKYPLESGVPLPSPMDLMYKILVKNKKKSHKSSEGSGKKKLSEQASNTYSDSSSMFEPSSPGAGEADTESDDDDDDDDCKKSSMDEGTAGSEAMATEEMSNLVNYIQPVKFESFEISKKRNKSFEMSSFVETKGLEQLTKSPVEFVEYNKMQLSRIYPKGTRVDSSNYMPQLFWNAGCQMVALNFQTMDLAMQINMGMYEYNGKSGYRLKPEFMRRPDKHFDPFTEGIVDGIVANTLSVKIISGQFLSDKKVGTYVEVDMFGLPVDTRRKAFKTKTSQGNAVNPVWEEEPIVFKKVVLPTLACLRIAVYEEGGKFIGHRILPVQAIRPGYHYICLRNERNQPLTLPAVFVYIEVKDYVPDTYADVIEALSNPIRYVNLMEQRAKQLAALTLEDEEEVKKEADPGETPSEAPSEARTTPAENGVNHTTTLTPKPPSQALHSQPAPGSVKAPAKTEDLIQSVLTEVEAQTIEELKQQKSFVKLQKKHYKEMKDLVKRHHKKTTDLIKEHTTKYNEIQNDYLRRRAALEKSAKKDSKKKSEPSSPDHGSSTIEQDLAALDAEMTQKLIDLKDKQQQQLLNLRQEQYYSEKYQKREHIKLLIQKLTDVAEECQNNQLKKLKEICEKEKKELKKKMDKKRQEKITEAKSKDKSQMEEEKTEMIRSYIQEVVQYIKRLEEAQSKRQEKLVEKHKEIRQQILDEKPKLQVELEQEYQDKFKRLPLEILEFVQEAMKGKISEDSNHGSAPLSLSSDPGKVNHKTPSSEELGGDIPGKEFDTPL

SEQ ID NO: 464 - DNA, 579 bp, Homo Sapiens
atggccggggctcaacccggagtgcacgccttgcaactcaagcccgtgtgcgtgtccgacagcctcaagaagggcaccaaattcgtcaagtgggatgataaatcatggaccatggaagaacaagaatatggtagacatgaaggaaatgtagagggtgagttgcctgctctcaagcacgatgcagaatgcaagacagtgtcaactgagaggccagatctatattacttgtgcagggaggactcaactattgttactccaattattttgaggactgaccctcagggatttttcttttactggacagatcaaaacaagctcttctgccagcctctcctggagactgaggggcttccaggccagtgggccctaggctttgagaaatccctcagacatagatgcagctggaagctgtccgttggcatacatgaaaacacatgggcaccaccagcagcaaccactctggtggctttaatttctgaagatattggagtagctcagatgccactttgggagctcaaaggggaagctagccctgcagaagacaagccagtgaagaaccaagtccttaatgatgtcatt

SEQ ID NO: 465 - protein, 193 aa, Homo Sapiens
MAGAQPGVHALQLKPVCVSDSLKKGTKFVKWDDKSWTMEEQEYGRHEGNVEGELPALKHDAECKTVSTERPDLYYLCREDSTIVTPIILRTDPQGFFFYWTDQNKLFCQPLLETEGLPGQWALGFEKSLRHRCSWKLSVGIHENTWAPPAATTLVALISEDIGVAQMPLWELKGEASPAEDKPVKNQVLNDVI

SEQ ID NO: 466 - DNA, 7020 bp, Homo Sapiens
tctgtgtatagaggatgtgctgaatggtgcgctttgaggcggcggcggcggaggagcagaatccgccgcgactggcagcctcggctgaccggctcggcttctcttcgccttccgaggctcctcatccaccgcgggctccagacctcgcgtcccgcccggggcatggccgggcgctgcgcccccgcgcgctctgcctgctgagcggcgccggagggaggtgcggaggccgggaggccggggaggccggcggggagcagagtcgagcgcctccggagcagagaaaggagcccgcgccccgcgccccgcgccccgcgcacggtccccagtccctgccgcgctcgcccgggccgcccggagcccagatgagcccagatggccggggctcaacccggagtgcacgccttgcaactcaagcccgtgtgcgtgtccgacagcctcaagaagggcaccaaattcgtcaagtgggatgatgactcaactattgttactccaattattttgaggactgaccctcagggatttttcttttactggacagatcaaaacaaggagacagagctactggatctcagccttgtcaaagatgccagatgtgggagacacgccaaagctcccaaggaccccaaattacgtgaacttttggatgtggggaacatcgggcgcctggagcagcgcatgatcacagtggtgtatgggcctgacctcgtgaacatctcccatttgaatctcgtggctttccaagaagaagtggccaaggaatggacaaatgaggttttcagtttggcaacaaacctgctggcccaaaacatgtccagggatgcatttctggaaaaagcctatactaaacttaagctgcaagtcactccagaagggcgtattcctctcaaaaacatatatcgcttgttttcagcagatcggaagcgagttgaaactgctttagaggcttgtagtcttccatcttcaaggaatgattcaatacctcaagaagatttcactccagaagtgtacagagttttcctcaacaacctttgccctcgacctgaaattgataacatcttttcagaatttggtgcaaaaagcaaaccatatcttaccgttgatcagatgatggattttatcaaccttaagcagcgagatcctcggcttaatgaaatactttatccacctctaaaacaagagcaagtccaagtattgattgagaagtatgaacccaacaacagcctcgccagaaaaggacaaatatcagtggatgggttcatgcgctatctgagtggagaagaaaacggagtcgtttcacctgagaaactggatttgaatgaagacatgtctcagcccctttctcactatttcattaattcctcgcacaacacctacctcacagctggccaactggctggaaactcctctgttgagatgtatcgccaagtgctcctgtctggttgtcgctgtgtggagctggactgctggaagggacggactgcagaagaggaacctgtcatcacccatggcttcaccatgacaactgaaatatctttcaaggaagtgatagaagcaattgcggagtgtgcatttaagacttcaccttttccaattctcctttcgtttgagaaccatgtggattccccaaagcagcaagccaagatggcggagtactgccgactgatctttggggatgcccttctcatggagcccctggaaaaatatccactggaatctggagttcctcttccaagccctatggatttaatgtataaaattttggtgaaaaataagaagaaatcacacaagtcatcagaaggaagcggcaaaaagaagctctcagaacaagcctccaacacctacagtgactcctccagcatgttcgagccctcatccccaggagccggagaagctgatacggaaagtgacgacgacgatgatgatgatgactgtaaaaaatcttcaatggatgaggggactgctggaagtgaggctatggccacagaagaaatgtctaatctggtgaactatattcagccagtcaagtttgagtcatttgaaatttcaaaaaaaagaaataaaagttttgaaatgtcttccttcgtggaaaccaaaggacttgaacaactcaccaagtctccagtggaatttgtagaatataacaaaatgcagcttagcaggatatatccaaaaggaacacgtgtggattcatccaactatatgcctcagctcttctggaatgcaggttgtcagatggtggcacttaatttccagacaatggacctggctatgcaaataaatatggggatgtatgaatacaacgggaagagtggctacagattgaagccagagttcatgaggaggcctgacaagcattttgatccatttactgaaggcatcgtagatgggatagtggcaaacactttgtctgttaagattatttcaggtcagtttctttctgataagaaagttgggacttacgtggaagtagatatgtttggtttgcctgtggatacaaggaggaaggcatttaagaccaaaacatcccaaggaaatgctgtgaatcctgtctgggaagaagaacctattgtgttcaaaaaggtggttcttcctactctggcctgtttgagaatagcagtttatgaagaaggaggtaaattcattggccaccgtatcttgccagtgcaagccattcggccaggctatcactatatctgtctaaggaatgaaaggaaccagcctctgacgctgcctgctgtctttgtctacatagaagtgaaagactatgtgccagacacatatgcagatgtcatcgaagctttatcaaacccaatccgatatgtgaacctgatggaacagagagctaagcaattggctgctttgacactggaagatgaagaagaagtaaagaaagaggctgatcctggagaaacaccatcagaggctccaagtgaagcgagaacgactccagcagaaaatggggtgaatcacactacaaccctgacacccaagccaccctcccaggctctccacagccagccagctccaggttctgtaaaggcacctgccaaaacagaagatcttattcagagtgtcttaacagaagtggaagcacagaccatcgaagaactaaagcaacagaaatcgtttgtgaaacttcaaaagaaacactacaaagaaatgaaagacctggttaagagacaccacaagaaaaccactgaccttatcaaagaacacactaccaagtataatgaaattcagaatgactacttgagaaggagagccgctttggaaaagtccgccaaaaaggacagtaagaaaaaatcggaacccagcagccctgatcatggttcatcaacgattgagcaagacctcgctgctctggatgctgaaatgacccaaaagttaatagacttgaaggacaaacaacagcagcagctgcttaatcttcggcaagaacagtattatagtgaaaaataccagaagcgagaacatattaaactgcttattcaaaagttgacggatgtcgcagaagagtgtcagaacaatcagttaaagaagctcaaagaaatctgtgagaaagaaaagaaagaattaaagaagaaaatggataaaaagaggcaggagaagataacagaagctaaatccaaagacaaaagtcagatggaagaggagaagacagagatgatccggtcatatatccaggaagtggtgcagtatatcaagaggctagaagaagcgcaaagtaaacggcaagaaaaactcgtagagaaacacaaggaaatacgtcagcagatcctggatgaaaagcccaagctgcaggtggagctggagcaagaataccaagacaaattcaaaagactgcccctcgagattttggaattcgtgcaggaagccatgaaaggaaagatcagtgaagacagcaatcacggttctgcccctctctccctgtcctcagaccctggaaaagtgaaccacaagactccctccagtgaggagctgggaggagacatcccaggaaaagaatttgatactcctctgtgaatgctcctgccaggccttcagaaattgcatggccactccagcgtcatcggactctctcttattacaaagatcactgcccaggaccatcttcccgagaagcatcccttagcctaaaatccacaccaaagggagagttccagaggaatccatgaagaattcccatgcccaggctccatgtgtcatgtggaaacctccacaggtctgctagtgaagaatgcatgtatgtgagatttttgttttctttccaatagcaaattcaaagcaagcaacttgcaggctccatggaacttttaatgaaggacagtgtcttctttgaagaaaatcaagctcgtgtttttattcgaagctctggtgtaaaatatttcaaagtcatagaaatagtttgagaaatgcatagcattatttaacactattgaacagccgactttgagcattgtttcttctaactgcccctcaactaccattatcttcaagtcaacatgcatattacattttcatcctttgctttgcaagcactggtggcttgcagtttgctaatttatttatcatagagtcatcaatgtatttgttgctgacatggttttattagatactgtagtgattcaaataagttttctatttgaaaaaaaaaatcacttgattgtatccttgcccagtgaagccatcctaagacttagcaatatggattgtacatttggctgcatgagcaagtcggccgcacacttccagacagtgtgctgtttgaattgactatttgcactcaaagtctgggtattcattggttattggcctgaaatgatcaaataactacaaatgatctgttgagttccggtggttattttgccgtttgacattttttatggttcatttatttttaatatagagaggaagattgaatatttatctagagaatacaaagacccacatgtaaatgataggtattatctccatgtatatatgtacccacttagtcatgtaagtgcatatacacatacacacacatgagtgtagacatgtgtttattaattgacaatgacccaaatctcttccacaagacttaaaaccaaattcagggacaaatggatagagaagaaaagggtcaaacatcgagattacatggatgttaaattatatggagacgctaagaaataattgatggagccattgatgcaaaccgaagtagatttagaacttatatgaatttgatttatattttgcaagatcaaaaattagatgttaagtatcagattttaagcttgttttaatggtcaaaaaattaggacagaaataatatggacatttattagtatcttccataatttttaagtctgacacatttctattttattctaacataaaaaaacttccattatatatttactaagtatatttaattcacttaactctgtctttataagttcctattttagatggaataagagaaacaaattatatcaaggtaaaactgatcaaaagcataattgaaagttctgaaaaaagaaaaataataatatgtagaaaaatgtaacttagagagtaacacatgaacattgaagttaaaacccagaagccagatgctcacagttttattttactttaaaataaacctgtctgactgtagctttgcgaaatatcttaaaacgcaaaaaccagttgtgtcctgaaaattgtttcaagaatttaatatttttatgaaaattattttatttaactttaagcaataactagagattacaattaaattttaatcaaaatgaaggcttagttcaaacataaggaaacagtgtttgattaaaaaaaacacatctagtaagacgtaaggggaaaatcacatcctctttggagatgattatattttgatctgaagggtttggggtgttcattagacacttaataaaacttaacttccaatgaaaaagaaatcttttgtaaatcattctacttttgcactttgaaagaaaggcgttaatcataaagaagcaagaatggtcaaaatcgaatgctgcatttttataaacaaaattacagactgtctgaaattgaagaagaatgaactaataatagcattcataaccaaacacaatgatgattattgcagaacattgtatcacattttagtccagagatagaataaagttgaataaccttgacttacacaaaactgttttggtagttggatttcattatcttagtgaatttagtcattttacaatatgtttgtatttggccatttactgtaatcacatttttatatctgtacaatgacactttttgcagttgtggggtagtgtgtaacactgtccatcttgcatcattgaaactactacaatgatactatcatttaataatattaatattacttgaaatagactaagataaagaaaaggggtctgtatgatgtgcagttttgtgcctttatgtatttgccttgttctttgtcgaatgtgtgaaattccgtactgtggtttttcctataatagaaagtagagctgtgtattaaattagactgtgtctctctgatacctttacactactgagaatagcatggttttggccatgtaaaccaattttcaaagttctaatgacatagccatgtgtttttggttttttatatttcattttaaaatttgagtatcaccatacattaattaatactcctgtagtagataagctgtcattaagtaattcccaaaaaaagggccatttgcttgcattactttgaatttaatgttgcgcttgtgcactgtgttaatattgtttgtgatggattggacgttgtgactcttgccttttaagaagaaaaaaaagataggacaaagtatttgaagctcttaaaatgtacatattttggttcttctatctcaaattatttaaaatgcataattcacatttttgtaataattctatgcaattttgtggcatgatgtttcttccacttgtaattttatgtgctttcatcacaaatccaaaggaaagaataaaaatttcttaacacaa

SEQ ID NO: 467 - protein, 1216 aa, Homo Sapiens; identical to SEQ ID NO: 463

SEQ ID NO: 468 - DNA, 6456 bp, Homo Sapiens
gaccccaaattacgtgaacttttggatgtggggaacatcgggcgcctggagcagcgcatgatcacagtggtgtatgggcctgacctcgtgaacatctcccatttgaatctcgtggctttccaagaagaagtggccaaggaatggacaaatgaggttttcagtttggcaacaaacctgctggcccaaaacatgtccagggatgcatttctggaaaaagcctatactaaacttaagctgcaagtcactccagaagggcgtattcctctcaaaaacatatatcgcttgttttcagcagatcggaagcgagttgaaactgctttagaggcttgtagtcttccatcttcaaggaatgattcaatacctcaagaagatttcactccagaagtgtacagagttttcctcaacaacctttgccctcgacctgaaattgataacatcttttcagaatttggtgcaaaaagcaaaccatatcttaccgttgatcagatgatggattttatcaaccttaagcagcgagatcctcggcttaatgaaatactttatccacctctaaaacaagagcaagtccaagtattgattgagaagtatgaacccaacaacagcctcgccagaaaaggacaaatatcagtggatgggttcatgcgctatctgagtggagaagaaaacggagtcgtttcacctgagaaactggatttgaatgaagacatgtctcagcccctttctcactatttcattaattcctcgcacaacacctacctcacagctggccaactggctggaaactcctctgttgagatgtatcgccaagtgctcctgtctggttgtcgctgtgtggagctggactgctggaagggacggactgcagaagaggaacctgtcatcacccatggcttcaccatgacaactgaaatatctttcaaggaagtgatagaagcaattgcggagtgtgcatttaagacttcaccttttccaattctcctttcgtttgagaaccatgtggattccccaaagcagcaagccaagatggcggagtactgccgactgatctttggggatgcccttctcatggagcccctggaaaaatatccactggaatctggagttcctcttccaagccctatggatttaatgtataaaattttggtgaaaaataagaagaaatcacacaagtcatcagaaggaagcggcaaaaagaagctctcagaacaagcctccaacacctacagtgactcctccagcatgttcgagccctcatccccaggagccggagaagctgatacggaaagtgacgacgacgatgatgatgatgactgtaaaaaatcttcaatggatgaggggactgctggaagtgaggctatggccacagaagaaatgtctaatctggtgaactatattcagccagtcaagtttgagtcatttgaaatttcaaaaaaaagaaataaaagttttgaaatgtcttccttcgtggaaaccaaaggacttgaacaactcaccaagtctccagtggaatttgtagaatataacaaaatgcagcttagcaggatatatccaaaaggaacacgtgtggattcatccaactatatgcctcagctcttctggaatgcaggttgtcagatggtggcacttaatttccagacaatggacctggctatgcaaataaatatggggatgtatgaatacaacgggaagagtggctacagattgaagccagagttcatgaggaggcctgacaagcattttgatccatttactgaaggcatcgtagatgggatagtggcaaacactttgtctgttaagattatttcaggtcagtttctttctgataagaaagttgggacttacgtggaagtagatatgtttggtttgcctgtggatacaaggaggaaggcatttaagaccaaaacatcccaaggaaatgctgtgaatcctgtctgggaagaagaacctattgtgttcaaaaaggtggttcttcctactctggcctgtttgagaatagcagtttatgaagaaggaggtaaattcattggccaccgtatcttgccagtgcaagccattcggccaggctatcactatatctgtctaaggaatgaaaggaaccagcctctgacgctgcctgctgtctttgtctacatagaagtgaaagactatgtgccagacacatatgcagatgtcatcgaagctttatcaaacccaatccgatatgtgaacctgatggaacagagagctaagcaattggctgctttgacactggaagatgaagaagaagtaaagaaagaggctgatcctggagaaacaccatcagaggctccaagtgaagcgagaacgactccagcagaaaatggggtgaatcacactacaaccctgacacccaagccaccctcccaggctctccacagccagccagctccaggttctgtaaaggcacctgccaaaacagaagatcttattcagagtgtcttaacagaagtggaagcacagaccatcgaagaactaaagcaacagaaatcgtttgtgaaacttcaaaagaaacactacaaagaaatgaaagacctggttaagagacaccacaagaaaaccactgaccttatcaaagaacacactaccaagtataatgaaattcagaatgactacttgagaaggagagccgctttggaaaagtccgccaaaaaggacagtaagaaaaaatcggaacccagcagccctgatcatggttcatcaacgattgagcaagacctcgctgctctggatgctgaaatgacccaaaagttaatagacttgaaggacaaacaacagcagcagctgcttaatcttcggcaagaacagtattatagtgaaaaataccagaagcgagaacatattaaactgcttattcaaaagttgacggatgtcgcagaagagtgtcagaacaatcagttaaagaagctcaaagaaatctgtgagaaagaaaagaaagaattaaagaagaaaatggataaaaagaggcaggagaagataacagaagctaaatccaaagacaaaagtcagatggaagaggagaagacagagatgatccggtcatatatccaggaagtggtgcagtatatcaagaggctagaagaagcgcaaagtaaacggcaagaaaaactcgtagagaaacacaaggaaatacgtcagcagatcctggatgaaaagcccaagctgcaggtggagctggagcaagaataccaagacaaattcaaaagactgcccctcgagattttggaattcgtgcaggaagccatgaaaggaaagatcagtgaagacagcaatcacggttctgcccctctctccctgtcctcagaccctggaaaagtgaaccacaagactccctccagtgaggagctgggaggagacatcccaggaaaagaatttgatactcctctgtgaatgctcctgccaggccttcagaaattgcatggccactccagcgtcatcggactctctcttattacaaagatcactgcccaggaccatcttcccgagaagcatcccttagcctaaaatccacaccaaagggagagttccagaggaatccatgaagaattcccatgcccaggctccatgtgtcatgtggaaacctccacaggtctgctagtgaagaatgcatgtatgtgagatttttgttttctttccaatagcaaattcaaagcaagcaacttgcaggctccatggaacttttaatgaaggacagtgtcttctttgaagaaaatcaagctcgtgtttttattcgaagctctggtgtaaaatatttcaaagtcatagaaatagtttgagaaatgcatagcattatttaacactattgaacagccgactttgagcattgtttcttctaactgcccctcaactaccattatcttcaagtcaacatgcatattacattttcatcctttgctttgcaagcactggtggcttgcagtttgctaatttatttatcatagagtcatcaatgtatttgttgctgacatggttttattagatactgtagtgattcaaataagttttctatttgaaaaaaaaaatcacttgattgtatccttgcccagtgaagccatcctaagacttagcaatatggattgtacatttggctgcatgagcaagtcggccgcacacttccagacagtgtgctgtttgaattgactatttgcactcaaagtctgggtattcattggttattggcctgaaatgatcaaataactacaaatgatctgttgaataaaaatagttgagctgatatatgttaagcagatattcaatcagaatgaacaggttccggtggttattttgccgtttgacattttttatggttcatttatttttaatatagagaggaagattgaatatttatctagagaatacaaagacccacatgtaaatgataggtattatctccatgtatatatgtacccacttagtcatgtaagtgcatatacacatacacacacatgagtgtagacatgtgtttattaattgacaatgacccaaatctcttccacaagacttaaaaccaaattcagggacaaatggatagagaagaaaagggtcaaacatcgagattacatggatgttaaattatatggagacgctaagaaataattgatggagccattgatgcaaaccgaagtagatttagaacttatatgaatttgatttatattttgcaagatcaaaaattagatgttaagtatcagattttaagcttgttttaatggtcaaaaaattaggacagaaataatatggacatttattagtatcttccataatttttaagtctgacacatttctattttattctaacataaaaaaacttccattatatatttactaagtatatttaattcacttaactctgtctttataagttcctattttagatggaataagagaaacaaattatatcaaggtaaaactgatcaaaagcataattgaaagttctgaaaaaagaaaaataataatatgtagaaaaatgtaacttagagagtaacacatgaacattgaagttaaaacccagaagccagatgctcacagttttattttactttaaaataaacctgtctgactgtagctttgcgaaatatcttaaaacgcaaaaaccagttgtgtcctgaaaattgtttcaagaatttaatatttttatgaaaattattttatttaactttaagcaataactagagattacaattaaattttaatcaaaatgaaggcttagttcaaacataaggaaacagtgtttgattaaaaaaaacacatctagtaagacgtaaggggaaaatcacatcctctttggagatgattatattttgatctgaagggtttggggtgttcattagacacttaataaaacttaacttccaatgaaaaagaaatcttttgtaaatcattctacttttgcactttgaaagaaaggcgttaatcataaagaagcaagaatggtcaaaatcgaatgctgcatttttataaacaaaattacagactgtctgaaattgaagaagaatgaactaataatagcattcataaccaaacacaatgatgattattgcagaacattgtatcacattttagtccagagatagaataaagttgaataaccttgacttacacaaaactgttttggtagttggatttcattatcttagtgaatttagtcattttacaatatgtttgtatttggccatttactgtaatcacatttttatatctgtacaatgacactttttgcagttgtggggtagtgtgtaacactgtccatcttgcatcattgaaactactacaatgatactatcatttaataatattaatattacttgaaatagactaagataaagaaaaggggtctgtatgatgtgcagttttgtgcctttatgtatttgccttgttctttgtcgaatgtgtgaaattccgtactgtggtttttcctataatagaaagtagagctgtgtattaaattagactgtgtctctctgatacctttacactactgagaatagcatggttttggccatgtaaaccaattttcaaagttctaatgacatagccatgtgtttttggttttttatatttcattttaaaatttgagtatcaccatacattaattaatactcctgtagtagataagctgtcattaagtaattcccaaaaaaagggccatttgcttgcattactttgaatttaatgttgcgcttgtgcactgtgttaatattgtttgtgatggattggacgttgtgactcttgccttttaagaagaaaaaaaagataggacaaagtatttgaagctcttaaaatgtacatattttggttcttctatctcaaattatttaaaatgcataattcacatttttgtaataattctatgcaattttgtggcatgatgtttcttccacttgtaattttatgtgctttcatcacaaatccaaaggaaagaataaaaatttcttaacacaa

SEQ ID NO: 469 - protein, 1115 aa, Homo Sapiens
MITVVYGPDLVNISHLNLVAFQEEVAKEWTNEVFSLATNLLAQNMSRDAFLEKAYTKLKLQVTPEGRIPLKNIYRLFSADRKRVETALEACSLPSSRNDSIPQEDFTPEVYRVFLNNLCPRPEIDNIFSEFGAKSKPYLTVDQMMDFINLKQRDPRLNEILYPPLKQEQVQVLIEKYEPNNSLARKGQISVDGFMRYLSGEENGVVSPEKLDLNEDMSQPLSHYFINSSHNTYLTAGQLAGNSSVEMYRQVLLSGCRCVELDCWKGRTAEEEPVITHGFTMTTEISFKEVIEAIAECAFKTSPFPILLSFENHVDSPKQQAKMAEYCRLIFGDALLMEPLEKYPLESGVPLPSPMDLMYKILVKNKKKSHKSSEGSGKKKLSEQASNTYSDSSSMFEPSSPGAGEADTESDDDDDDDDCKKSSMDEGTAGSEAMATEEMSNLVNYIQPVKFESFEISKKRNKSFEMSSFVETKGLEQLTKSPVEFVEYNKMQLSRIYPKGTRVDSSNYMPQLFWNAGCQMVALNFQTMDLAMQINMGMYEYNGKSGYRLKPEFMRRPDKHFDPFTEGIVDGIVANTLSVKIISGQFLSDKKVGTYVEVDMFGLPVDTRRKAFKTKTSQGNAVNPVWEEEPIVFKKVVLPTLACLRIAVYEEGGKFIGHRILPVQAIRPGYHYICLRNERNQPLTLPAVFVYIEVKDYVPDTYADVIEALSNPIRYVNLMEQRAKQLAALTLEDEEEVKKEADPGETPSEAPSEARTTPAENGVNHTTTLTPKPPSQALHSQPAPGSVKAPAKTEDLIQSVLTEVEAQTIEELKQQKSFVKLQKKHYKEMKDLVKRHHKKTTDLIKEHTTKYNEIQNDYLRRRAALEKSAKKDSKKKSEPSSPDHGSSTIEQDLAALDAEMTQKLIDLKDKQQQQLLNLRQEQYYSEKYQKREHIKLLIQKLTDVAEECQNNQLKKLKEICEKEKKELKKKMDKKRQEKITEAKSKDKSQMEEEKTEMIRSYIQEVVQYIKRLEEAQSKRQEKLVEKHKEIRQQILDEKPKLQVELEQEYQDKFKRLPLEILEFVQEAMKGKISEDSNHGSAPLSLSSDPGKVNHKTPSSEELGGDIPGKEFDTPL

SEQ ID NO: 470 - DNA, 7192 bp, Homo Sapiens
tctgtgtatagaggatgtgctgaatggtgcgctttgaggcggcggcggcggaggagcagaatccgccgcgactggcagcctcggctgaccggctcggcttctcttcgccttccgaggctcctcatccaccgcgggctccagacctcgcgtcccgcccggggcatggccgggcgctgcgcccccgcgcgctctgcctgctgagcggcgccggagggaggtgcggaggccgggaggccggggaggccggcggggagcagagtcgagcgcctccggagcagagaaaggagcccgcgccccgcgccccgcgccccgcgcacggtccccagtccctgccgcgctcgcccgggccgcccggagcccagatgagcccagatggccggggctcaacccggagtgcacgccttgcaactcaagcccgtgtgcgtgtccgacagcctcaagaagggcaccaaattcgtcaagtgggatgatgactcaactattgttactccaattattttgaggactgaccctcagggatttttcttttactggacagatcaaaacaaggagacagagctactggatctcagccttgtcaaagatgccagatgtgggagacacgccaaagctcccaaggaccccaaattacgtgaacttttggatgtggggaacatcgggcgcctggagcagcgcatgatcacagtggtgtatgggcctgacctcgtgaacatctcccatttgaatctcgtggctttccaagaagaagtggccaaggaatggacaaatgaggttttcagtttggcaacaaacctgctggcccaaaacatgtccagggatgcatttctggaaaaagcctatactaaacttaagctgcaagtcactccagaagggcgtattcctctcaaaaacatatatcgcttgttttcagcagatcggaagcgagttgaaactgctttagaggcttgtagtcttccatcttcaaggaatgattcaatacctcaagaagatttcactccagaagtgtacagagttttcctcaacaacctttgccctcgacctgaaattgataacatcttttcagaatttggtgcaaaaagcaaaccatatcttaccgttgatcagatgatggattttatcaaccttaagcagcgagatcctcggcttaatgaaatactttatccacctctaaaacaagagcaagtccaagtattgattgagaagtatgaacccaacaacagcctcgccagaaaaggacaaatatcagtggatgggttcatgcgctatctgagtggagaagaaaacggagtcgtttcacctgagaaactggatttgaatgaagacatgtctcagcccctttctcactatttcattaattcctcgcacaacacctacctcacagctggccaactggctggaaactcctctgttgagatgtatcgccaagtgctcctgtctggttgtcgctgtgtggagctggactgctggaagggacggactgcagaagaggaacctgtcatcacccatggcttcaccatgacaactgaaatatctttcaaggaagtgatagaagcaattgcggagtgtgcatttaagacttcaccttttccaattctcctttcgtttgagaaccatgtggattccccaaagcagcaagccaagatggcggagtactgccgactgatctttggggatgcccttctcatggagcccctggaaaaatatccactggaatctggagttcctcttccaagccctatggatttaatgtataaaattttggtgaaaaataagaagaaatcacacaagtcatcagaaggaagcggcaaaaagaagctctcagaacaagcctccaacacctacagtgactcctccagcatgttcgagccctcatccccaggagccggagaagctgatacggaaagtgacgacgacgatgatgatgatgactgtaaaaaatcttcaatggatgaggggactgctggaagtgaggctatggccacagaagaaatgtctaatctggtgaactatattcagccagtcaagtttgagtcatttgaaatttcaaaaaaaagaaataaaagttttgaaatgtcttccttcgtggaaaccaaaggacttgaacaactcaccaagtctccagtggaatttgtagaatataacaaaatgcagcttagcaggatatatccaaaaggaacacgtgtggattcatccaactatatgcctcagctcttctggaatgcaggttgtcagatggtggcacttaatttccagacaatggacctggctatgcaaataaatatggggatgtatgaatacaacgggaagagtggctacagattgaagccagagttcatgaggaggcctgacaagcattttgatccatttactgaaggcatcgtagatgggatagtggcaaacactttgtctgttaagattatttcaggtcagtttctttctgataagaaagttgggacttacgtggaagtagatatgtttggtttgcctgtggatacaaggaggaaggcatttaagaccaaaacatcccaaggaaatgctgtgaatcctgtctgggaagaagaacctattgtgttcaaaaaggtggttcttcctactctggcctgtttgagaatagcagtttatgaagaaggaggtaaattcattggccaccgtatcttgccagtgcaagccattcggccaggctatcactatatctgtctaaggaatgaaaggaaccagcctctgacgctgcctgctgtctttgtctacatagaagtgaaagactatgtgccagacacatatgcagatgtcatcgaagctttatcaaacccaatccgatatgtgaacctgatggaacagagagctaagcaattggctgctttgacactggaagatgaagaagaagtaaagaaagaggctgatcctggagaaacaccatcagaggctccaagtgaagcgagaacgactccagcagaaaatggggtgaatcacactacaaccctgacacccaagccaccctcccaggctctccacagccagccagctccaggttctgtaaaggcacctgccaaaacagaagatcttattcagagtgtcttaacagaagtggaagcacagaccatcgaagaactaaagcaacagaaatcgtttgtgaaacttcaaaagaaacactacaaagaaatgaaagacctggttaagagacaccacaagaaaaccactgaccttatcaaagaacacactaccaagtataatgaaattcagaatgactacttgagaaggagagccgctttggaaaagtccgccaaaaaggacagtaagaaaaaatcggaacccagcagccctgatcatggttcatcaacgattgagcaagacctcgctgctctggatgctgaaatgacccaaaagttaatagacttgaaggacaaacaacagcagcagctgcttaatcttcggcaagaacagtattatagtgaaaaataccagaagcgagaacatattaaactgcttattcaaaagttgacggatgtcgcagaagagtgtcagaacaatcagttaaagaagctcaaagaaatctgtgagaaagaaaagaaagaattaaagaagaaaatggataaaaagaggcaggagaagataacagaagctaaatccaaagacaaaagtcagatggaagaggagaagacagagatgatccggtcatatatccaggaagtggtgcagtatatcaagaggctagaagaagcgcaaagtaaacggcaagaaaaactcgtagagaaacacaaggaaatacgtcagcagatcctggatgaaaagcccaagggggaaggttcctcctcattcttgtcggaaacttgccatgaggatccctctgtttcccccaactttactccccccaaccctcaagctctcaagtggtgaccaccgtccttccggccagctgcaggtggagctggagcaagaataccaagacaaattcaaaagactgcccctcgagattttggaattcgtgcaggaagccatgaaaggaaagatcagtgaagacagcaatcacggttctgcccctctctccctgtcctcagaccctggaaaagtgaaccacaagactccctccagtgaggagctgggaggagacatcccaggaaaagaatttgatactcctctgtgaatgctcctgccaggccttcagaaattgcatggccactccagcgtcatcggactctctcttattacaaagatcactgcccaggaccatcttcccgagaagcatcccttagcctaaaatccacaccaaagggagagttccagaggaatccatgaagaattcccatgcccaggctccatgtgtcatgtggaaacctccacaggtctgctagtgaagaatgcatgtatgtgagatttttgttttctttccaatagcaaattcaaagcaagcaacttgcaggctccatggaacttttaatgaaggacagtgtcttctttgaagaaaatcaagctcgtgtttttattcgaagctctggtgtaaaatatttcaaagtcatagaaatagtttgagaaatgcatagcattatttaacactattgaacagccgactttgagcattgtttcttctaactgcccctcaactaccattatcttcaagtcaacatgcatattacattttcatcctttgctttgcaagcactggtggcttgcagtttgctaatttatttatcatagagtcatcaatgtatttgttgctgacatggttttattagatactgtagtgattcaaataagttttctatttgaaaaaaaaaatcacttgattgtatccttgcccagtgaagccatcctaagacttagcaatatggattgtacatttggctgcatgagcaagtcggccgcacacttccagacagtgtgctgtttgaattgactatttgcactcaaagtctgggtattcattggttattggcctgaaatgatcaaataactacaaatgatctgttgaataaaaatagttgagctgatatatgttaagcagatattcaatcagaatgaacaggttccggtggttattttgccgtttgacattttttatggttcatttatttttaatatagagaggaagattgaatatttatctagagaatacaaagacccacatgtaaatgataggtattatctccatgtatatatgtacccacttagtcatgtaagtgcatatacacatacacacacatgagtgtagacatgtgtttattaattgacaatgacccaaatctcttccacaagacttaaaaccaaattcagggacaaatggatagagaagaaaagggtcaaacatcgagattacatggatgttaaattatatggagacgctaagaaataattgatggagccattgatgcaaaccgaagtagatttagaacttatatgaatttgatttatattttgcaagatcaaaaattagatgttaagtatcagattttaagcttgttttaatggtcaaaaaattaggacagaaataatatggacatttattagtatcttccataatttttaagtctgacacatttctattttattctaacataaaaaaacttccattatatatttactaagtatatttaattcacttaactctgtctttataagttcctattttagatggaataagagaaacaaattatatcaaggtaaaactgatcaaaagcataattgaaagttctgaaaaaagaaaaataataatatgtagaaaaatgtaacttagagagtaacacatgaacattgaagttaaaacccagaagccagatgctcacagttttattttactttaaaataaacctgtctgactgtagctttgcgaaatatcttaaaacgcaaaaaccagttgtgtcctgaaaattgtttcaagaatttaatatttttatgaaaattattttatttaactttaagcaataactagagattacaattaaattttaatcaaaatgaaggcttagttcaaacataaggaaacagtgtttgattaaaaaaaacacatctagtaagacgtaaggggaaaatcacatcctctttggagatgattatattttgatctgaagggtttggggtgttcattagacacttaataaaacttaacttccaatgaaaaagaaatcttttgtaaatcattctacttttgcactttgaaagaaaggcgttaatcataaagaagcaagaatggtcaaaatcgaatgctgcatttttataaacaaaattacagactgtctgaaattgaagaagaatgaactaataatagcattcataaccaaacacaatgatgattattgcagaacattgtatcacattttagtccagagatagaataaagttgaataaccttgacttacacaaaactgttttggtagttggatttcattatcttagtgaatttagtcattttacaatatgtttgtatttggccatttactgtaatcacatttttatatctgtacaatgacactttttgcagttgtggggtagtgtgtaacactgtccatcttgcatcattgaaactactacaatgatactatcatttaataatattaatattacttgaaatagactaagataaagaaaaggggtctgtatgatgtgcagttttgtgcctttatgtatttgccttgttctttgtcgaatgtgtgaaattccgtactgtggtttttcctataatagaaagtagagctgtgtattaaattagactgtgtctctctgatacctttacactactgagaatagcatggttttggccatgtaaaccaattttcaaagttctaatgacatagccatgtgtttttggttttttatatttcattttaaaatttgagtatcaccatacattaattaatactcctgtagtagataagctgtcattaagtaattcccaaaaaaagggccatttgcttgcattactttgaatttaatgttgcgcttgtgcactgtgttaatattgtttgtgatggattggacgttgtgactcttgccttttaagaagaaaaaaaagataggacaaagtatttgaagctcttaaaatgtacatattttggttcttctatctcaaattatttaaaatgcataattcacatttttgtaataattctatgcaattttgtggcatgatgtttcttccacttgtaattttatgtgctttcatcacaaatccaaaggaaagaataaaaatttcttaacacaa

SEQ ID NO: 471 - protein, 1173 aa, Homo Sapiens; identical to SEQ ID NO: 461

SEQ ID NO: 472 - DNA, 43677 bp, Mus Musculus
tctcgagattaaaaccctttcagaaaatttgattacaaatctagagaatttgtaggggttaggactgggaacagaatagaaagtgagattgaaaatctttccccaggaggaggcagatggttttgcaggtaaagacgcctggtgccaagcgtggctgcttgagttcagtccccggaactcggaaggtggaaggtaagatcctagtcctccaaattgttctctaacctctacaccgctctgaggctccagggtacttacacacatacacggaaacaatcaaccagtcaaacaataaacgtaaaatattacaattctttagggaatccaagggtatttggtctcttaggtaggggtccaaaatctctggggatagggtttagaatcctttggacaggctcattacatcatggggggcttaaacgcactagtgggggagggggactgggaatcttgggagggcgggtcaaaccttggtgtctgagtaagtccttcaaggactggttagcgcccttgaggacagggttagcaaagaaatgctgaaattctttggaggtgaatttagagcaggagacaagagagccagagtgggagttaggctcttagagggcggagtcggggtatttgggggcggggtttgcatcacccagggtgcggctaaggcgcccagatggccagtgagcgccactgggttgcggctcccagcttgcactccccgcggcggctctcagacgggtgggaggggaccaaagtcgcccgtgaagggggctctgacccgttccgagcgccaacgcagcctctgtagcccgcaagtcttcgtcgcttgctccgggctctgaagtccggggccaccaggggccgcagcgctggggggtcggtctagctgcgaggatccgggctgcccacgaagcgaagggcgggcgcccaggtgagtgcggggtgagagggcgggaatgggacacacccccgtccccgagaacgtgcagacctcgggctccagggatctgagatcctgggcgagctgtgggggtgccgaggaaggaagaacccgtcctaggagcaaccgatccccggcggtgggatgcgcagtctacgaaaggtggagggtacccaggtggccaggtgaggcgaattgccgccacccagggcgaccctgggatagccctagatagaggaagctcaggcaggggaatggcagtgctgagctgaggcttctctgtctaaccaggttccccttctgcacacacacacacacacacacacacacacaccaagaagaagaagctggaggggagggaaaggcccgttcagttcccattgatggtgggtgggtggcaggtcacgcaggtagacagcagccatggctaaaggaacagcccggccaagacaagcccatgcctgccacacccaggcctggctgtaggtgtatatctgagtcccctcttttacatcttcccctgccttcccagctgaacccctaacaggcgtacatccaactccagaacctcttacacaaagaccacaatctaccaccatctcctctgtgtgacactggggcatgtcactggctactctctggattccagcttccaactctgtaaaatgggctgttttacattcatctgaagctgagttgtccagagaaggggagcagtgctgctgggtactggagagagagcctggtttgtctgtgcctctgtttgcatagctgcaggatggagatggtaagaggacaggttgaatgttccctatccaaactacacctgatcagaggggtttaggatttccgagtgtggcagaattctgtatgtcaagtgcacagcgaggcatcctggagtgaaaattaggtcttaaagagacatttgtgtatgttacacgtgcttctgtatgtgttcactggttggtgtgtactctggggttcctacacacgtggaggccagaggactctatgttgttcttcaagcaaaggccaccttgcttttggagacagggtctatcatcggcctggggcttttgctgggtaggtgaggccggctgattagtgggtcccaagggtccttcctcccagctgacttttttcaggagttctgggggttgtaactcagttccccctgtttgcaaggtactcactttaccaactgggctatcttcctggcccgagattttcacacatttcattctcatccctcagagataactaatgacacatttttaatggctcctccatttttacatcaattgatagcctcagatcaggtgtggactttcccacttggaccatcctgtcggtgcccaaaatgtctccgattttagagcatttcggatttaggcttgtggaagttcccttacttttgaaggtgacattaaactgaaggaaagggagcccaagaggtgactctgcatctaagagcactcactgctctttccaaggatgctagctaagttctcaccgatcgctcacaacaacagaaacacctcacagctgcctataactctagctccagggaatctcataccgtcttttgggcttggtcttgtaggcacctgcacacatgtgatctttctctctctctctctctctctctctcacacacacacacacacacacacacacacacacaatctgaaagaggggcggagaagagagaaagatggctgaaggaaaactttcagaaccctattagatgttctttccactgttcccgtccagcccgagagattctcacaccagcatcaccaggaaagggtgttaaaatgtgcattgctagggcaaccaccaaagggaggcctagggaaagatactgagaactggcaacctccgggctgctgatgctgcccagaaatctcactttgagaatcactgcccaagcctaggactgacccagagaggcctcacaagagagcagttgctctctagtgcccttctcaccatgccccttctctggaggaggaagggtgctgtttagtggaatatgtgcccatgtcccaggaactcaccacccaaaattaactaattcactaatgtcagtgtgggggcatgtttgcttcagactttaaaaagtaaaatgactaggtgtaatgggtaaaatcaaagtccctggtttggttccctctcagttctctctttctacctctataggagacactgctgttgaaaaccaatccttccagtctgtgtctcgataaacaaatgtgtcctctgtggtgtaaagattatagcagagcccgatgtaggagcacacctgcaaccccagaacttgggagtagaggcaggaggagcaaaaattcaaggtcatctttagctatagcaagagtttggggccagcctgggctatgagaccctgtctgtaacaaaataaaacttcagtcaacaagggatgtatcctgaaatcctggcagatgcctgaactgtagataatactgacttcctgtatatctttgcttatatatgaaagcctttctttgataactctgaattgatggcatcactagtcctgtgcctagggttatgatttaaacaacaagcattgcctgaacacatgcatagaaactaacgggtaggcagcacatactgcgtggatccattggagagcagggtgattccatcctggggaggacaggggtacactgtgagatttcatcactctaaccagaagggcgtgtggcttaaatcttagggttgcttatttttggaatttcccatgtggtagtttcaggctgcggttcactctgggcttgaaactgcaacctctgagcggactgtatgggaactactctacaccagtactgatttatgaggctcacccgcagtttgttttcccccgacttatcagattgagatccatcagggctgagcacttgaggtctaattcatttcttctagctgtagcatgttcatcctggctggtgacctctccacagttttttcccatcacccattgacagatattcaggttgcctccaatgttactccagtactgctgggaccatcgtgtgtgtgtgtgtgtgtgtgtgtgtgtgtgtgtgtgtgtgtgtgtgtttcttgggcacaggtacagttgtttcttgaggaaacactatgggagtggatggctctccatgtagcagtgtttcctgtcccttttaatgagaagagtattgagacttggaaagtcacttatggaagacaaagagaagagtcggctctgaggacctcctcactctttctatactatggcctggttaccagggcacgtgctctctgctgtgacaagcgtcagttgcctgttcacgatgcctgatgcttagtacacagcaaaagctggcagcattaattttgttacttcgaagttgttctacacaactttcatttaacatagcatttctggtgcctctgatgctgcgggtacagtttttgttctacttcgcttaattaagctgttagtatttccccgtgtcattaagattgccttgaattttgaaatggttatataatattccattttggggtgcaccatttttaacctccctgggctgatacatggtttttcaacttttctttttttataatgtgtgttataagtgtctgtctatacatatgtgtgtgcctagtgccctcagaggctagaagagagcagcaaaccccctagaactggacttacagatggttgtgagctgccatgtggcttcttggaactgaacttgggtcctccaagagagctgcaaatgttcttaaccgttgagccatctctccagcctataatttttcagcattctaagttgagatatgagccacttttccagcagctgcagtattctggctctcagtttgagggtacagtctgtcagggtggagcaggcatgagggcaaggctctagctgttgtggtgggagccgtcacctcctccttttcatagaggaaactagacttcgggaacacagtcagtaatacaatctccctcagcctccatttttctgagcaagttttggaccccagcctgttgctataggcctgggagtggaatagacttctagaagggcaggctgtgttggagaacaagcctttgcttgggtttaaaatgtgtccttgctcttgacttgtgactgtgtcctctggttggtgttctcttaggacttgcatgcatagttccttctgcaatggactagctgagctcccaacaccatcctgaagtgcttgggtccaggagaaatggaaagattaaccgtaaatagaacatggctgataaacctgagtttgagtgtgtgcactgtcttaaacaagttgtggctcaccgtgctaaccccttctcttggattcagtctagtcagctggaaaatgggcccaaggatacaatgctcacaatacgcacacacacacacatcatatcacatcacatcacacaagctgacgggatgcagcacagggccgattcagaggaaagaaatgggatgttggcctccctcctgtctggttgaaagctgctcctgcaggtgtagtgctttgctggtgtgtcagcttgtgaggctttcagacagagcagatacagagagatctccatggcacagaggtgctggtgccagcaggtggaagtccagccggaatgttccaagatggctcagtgctgagggatggggacaggccatgcacagcacctgcttccatatacacgtcaataaggccaaggccagatgttagcagaggttaccccaggtcagggatgggaggaggcccttggagggagtgaaaggagacacccaaagggacctcagattcactcagattcacttaggatgtttatacttttaacatgtttcgtttggtgacagcagacaagtttcattacatttatgtatccctgtgtggatatatacatgtatgtgggtatgcatgggtggaaccagagggcagcttgtgagaatcgtctctctccttccaccatgtgtgtcccagggatcaaactcaggtcatcagacttggcaggaggtgcctttgccctcagccctaacttttaaaaccaagcatgtgcactccgtaggatgaaagtacattacatatgtgtacagaactgtccccgtgaaacccgttgtttcctggagttctaaatctataccctccttgggactggagagatggcttagtgattggaagcatctgctgatctttcagaggatgggagtttagcactcaacaccgtgtcaggctgtaactctggaggatccatggtctctggtctgcacaagtatacacacccatgtgcacacacccacatgtagacacacatgaatacttaattaaaggtaataaaaattaatcctaaaacaatagacacatgctccaaaatataaaggaaaccagggcctagagctctgtcaactggaagatgtgaaatatgttcttgcttttttccctcttttttcatgtgtgtgtgtgtgtgtgtgtgtgtgtgtgtgtgtgtgtgtgtgatgtgtgtgtgtgtgtgtgtgcgctcaagcgtgtgtgcacacagtaaggtgaggacgctagaggttgatgctgggaatattctttgattgctcttcttcttattcactgaggcaggccctctcaatcaatcccagagtttgtcagtacagctcgcctccctgttccagcttcagaggccacaatcacagacagccagcatctccgaaggttctggggtttaaactctgatcctcgtgcttgcacataaagtgctttaaccactgagccatctccccaacacacatacacacactctctcttctctctcctctcgtcttcctctctcttctctttcttctttctctcaatttcttaaaatgaggatgaccttgaaatttcgatcctcctgcctccaccctccaaatgctgagattatggggtacttgcaacaacccttggcttatgtggcgctggggacagaacccagggctctgtttgtgcaagctgaacactctaccaactgagctacatccccagaccacattctagtgtctttgagacttggcatctatgagacatggttggggtgtctgacttgggaataacacagcaggtgagagtaaatgttgcctgtcaccaagccagccaccagccttgtgtaaaggggacagtcagctccagccaagaagcacttggttttgttgaggaaaactgagcaaactggaccatcgtccccacccagacacctttgtgactactgctgagaaggctgggtacgaaggaggcctgtatcactgatgtgtctttcccacagtcttccccttatccccttgatccagagtttctcacagaaactaaagctagactgccggccagcatgccccagagatcctcttatctccccaaacacccagttatagatacgtgctgtcacacctggatgctagggaccaggagccggggtccttacatttgaatagcaagattttctgcccactgagccatcttctcatccccctgggcaacattttaaagagctcttgtatttttaagagaaagaattgagattctaccccaggtgattctaggtctcatccagtacttctcaaactgctggcctcaaggcggtcaaacgaggtaaaaaaaaaaaaacaaaaacaaaaaacaaaaaaaaacaaaaaaaaaacaccccaggaaattcacagatgctgcagagccaaaggtaacgtcctaagattttgattggcagttgaactagctactgggggctcaagcacctcataccaactttgttacacgtgggagcagaagccaaagtctccagaaggcggggccccttgcctttgggtgacccagggcccactgtgggtctctggaacttttactccacctgaaaatgaagggctgaacctctaagactctttctgtgtgcacagaaatcatagcttggccagaggaagctaagtctcccaaaggaagcacacgaggagtcctccagagacaagtcgtacagagtaagcatggttctctcagaaagacaaccagggcatctgcggggactctgtaccccaaaaactgctctagaaaggaacttctgattagaaagatgcaccaatggctgagctgttccaagaacagaaagttcctcttatcagacagttgtaagccacaggccccctcagtggctgccatccccaggagcttcctttctgggcttctgactcccctagaccttggccagttgcctctgggcacggctccttcccacaggaatttatttcttctttggggcttcattttcccatctgaagaatgggttcctaattctggtttagatctatatatggtaagagaacacaatatgctcacacctcagacctagatggagggaccctcctatgccaggcacttcttaggtagtcatgacttcagtgccaccagcttgacaagatccacagtccccatcctcaccctctgtggaccctcctcatagcttaacttctcttgtaccaaggcctgctctcagagaagtttttgctaatcagccatttatccttgagtgtgaattgcaagcccctcctaaaactctcctgtattctgggaagaactctatgtgtggtattaagggacaaaaatctaattcaaattaacccaaggagcagaggaatttattggcaactccacatgactctaacttcaggccaagctgcatttaagtttgggagtctggatgtctctatttcctggttctttgtggctactgaaaacatctttcctagacagaggccacggactgatgctccttggtcagaactgagttgcaacctacttggcttctttggctacagctctgattggtcacagacctactcctgcaggagactgaagctaaggctacctcagtccatgagccaatctttttttttttaaagatttatttatttattatatgtaagtacactgtagctgtcttcagacactccagaagagggcgtcggatcttgttacagatggtgagccaccatgtggttgctgggatttgaactccggaccttcggaagagcagtcgggtgcttttacccactgagccatctcaccagccctccatgagccaatcttgaggtaggggttcacagaggagaactggggagctgctgctaatggtggcaaacagatgttgtgtaggaagaaccttcagttgtctccttcagggtaggtcttgttcacttctgtagaaatggaggcttgcctaaggtcacacagtgagcttttggcaatgatgggcctagagtacaaatgctttcagaaccctgcctcacccagtgatactcatgcaggcccggcctccttcttggcttagagtctgagaggatctacagccagcatgacagccctgggaaacagccagccaggctaactggcttttttctcttccatgtagtaactatagaactgaggagtcatagggagtggggtggctgtggattgccctagacgtggtcagcagctttgagtcagtgtggaactggaggctacttctgctcccggtgcctgactgggaactatttttgacaagcaatgttcatgtgcaagttttgaaaagttaccacagcctttgtctccgaagacctcaagccaagcccgagaagcaagggcttcctccttacagagaggaaaacgaaactcagagagggagggcgggggtgaaccccactacacaggggggggggtgaactaggagtttgggtcctgaggttctgccaccactggctgtgagaacggtgttctcagtgtttcctccaactgacccacaaaatagagaagagacctaatcttaaagtacaaagctagcttcacccagatgcagaacgaggcatacccagccatatccctgacaaatatagttgcaccaaaagaaagaaagaaagaaagaaagaaagaaagaaagaaagaaagaaaggaaggaaggaaggaaggaaggaagaaaggaagaaagaaaagagaaaagagaaaagagaaaagagaaaagagaaaagagatcctcagtaaaacacttgcaaacaaaattcaagaacacacttaaagcatacacttcatccgtgttggtttcactccagggatgcaagcatgactcaacattcacaaatcagtacatgtaacatagatagtattagggacagaaatcacacgatcatctcaatggattcaaaaagtggctttaatgaagtttaacatcgctgataaaaagaaaaaaaccctgaagaaactaggaacagaaggagtcgtcctcagcatactgaaggctgtataccacagattgacagccaacaccatattaagaggggaaaactgaaagcgtttcctcccaagtcagctctctctctctctctctctctctctctctctctctttgatttggtttttcaagacagggtttctctgtgtagtcctggctgtcctggaactcactctgtggaccaggctggcctcgaactcagaaatccgcctgcctctgcctcccaagtgctgggattagaggcgtgcgccaccactgcctggcctctggccactcttattcagtgtagtgcttgaagtcttatccagagcaataagacaagaaaaaggaacacaaatagaaaaggaagaagtcagatcacccccatctgaatagtacatgatctgtaaccttggggtggtttgtttgtttgtttgtttgttgtgatttggttcattttgtgcattttctgaaccaggatatctctttggtggcaggctggccttgaactctctatgtagctcaggttagccttgaattcatgttgttcctcctacctcaatctctcaagtgccaggttgtaagctgttggtttatgatcctacacctaaaagcctctacagattctaccagaaaactcttagccctaataaatgtttccagctaagtagcaggctaaaaggtcaacattgaaaatcagtagattttctatatctgaataatgaacttgttgaaaactaaatcaggaaaaaaaaaatcctactcacaacagctctttaaaaatacccagaaatcaatctaaccaaggagataaaagacatccatagtggaaacttcaagacaccgaagaaagaaattgaaggagatgctagaagagggagagatcctccatcttcatgggttaacaaactcaatcctgagacaatgctaagttaccaaaagcaatctgcagtttcagtataatacccataaaaaccccaatggcatccttcacagaaataggaaaacaaaacaaaaaacaaaaaccctttcctccttcccatcagtgagcaatttctagtttcctggattttacttcaggttaaacacacaaacctaaagattcagagataggatccacatgtgagtgagagaatttgacatctgtttttcagggtctgagtgacagtaataaccatagatgcaatagtagtataaaggcagagacatagccaagaactttatattgttttaatatttatttatttattatatgtacgtacactgtagctgtcttcagacactccagaagagggtgtcagatcttattacggatggttgtgagccaccatgtggttgctgggatttgaactcaggaccgttggaagagcagtcagtgctcttacccactgagccatctcgccagcccagccaagaactttatgattggatttaaggcctgctatgcagaagggaaccaatggtgcctagttttgttttttattttgtttttgtttttaatctgcccaagaacccacagttgggggagctcattggtcccaagtgtgaacatactactactgttttactaataaacatcgaaccaagatgagtgccactctcaggtcttatcagaaaagtttctttgtgcaaagcatgatggttaatgcagaaactagctgttgataaactgtgagtgcacgtgtaaaaggagggaacttgatccatgcatctcactctgtacaaaaccaactcggccttcatgtaagactcgaacctgctgcgaaaagcacaggcgaggttttcctgcaaaggactccaagagttatgaatgagcttgtgtaagattaaaaggttctgcagtctgtggaatggaaaaggatactttctagctataagtcagagaagtgattaataatgacaatattaaaaactgcaagagctaaatgacaagaagccaagtcatctaatcaatacatgggatatgactgaatatgccagagttctcaaagaaaaaaatacatggtcaataccatttgaaacaaatgttcaacacctttagctaacagggaactacacattaaagctagattgtacttttatctcacccattcagaatggctatcatcaagaaaaccaatgaggctgaggcaggggaactgtggtgagtgagttttaggctagcctgggctacatagtgagcctttgtcttaaacaaaaagcaaagggacagtgacaaatgccagtgaggccgtggggaaagtcgatgctgatgggtgtggctaagtgtagccaccatggacgtcaatatgaaggttcctcaaaaccctaaagctagagctaccatgtgacccagctgtccggcttctgggtatatacccgaagggttggaagccaacacagctgcacagcctcgtttattgctgcactagtcgccatggccagcaagtggaaccagcctagagatctatcagcagctgaatggataaagaaagtgagatacatatacagaatggagtattactcgtctgtaaagaagaataaaattatgcagttttaagaaaagagagtgagactgaagcccattagaataggtagaataagccgggcttgggaaaacaaataccatttttctatcaaaagcagaacctagatataaatttgcatatacatgtatggtgtgtgtgtgtgagggagggaggaggaggcctagagggaggaaggaggaggaaagacaaaggatataagttaacataaaagccggttgtagtaaatgcgtatgacacgaagtctctcaccttaaccattttaagtgtgtagctcagtggcatttaaatacattcataatgtgccaccattatcatcgtccaccttaatatcctccatcatcttctaaaactcaagatgcctccgttcaataaaactccctccacccctcctgctccaggccatcaccaatctaactgtctctaacaatggagtctctctatgtgtggctttgagatgtaattctgtgtgtttgaatttcacttctcaacttgatccaaggagcaaaagccatatgtggtttgtttaggtgaccagtcactggaagatggctcagcagtaaagtgctcaccagcaagcctgacaacctgtttggatccacagaactacataaagctagccacagctgcacgtgtgtttaatccaccatccgtggaagaatgggaggtggaggcaggagaatgagtcaccaaaagctctcaggtcagctagcctgccacaggcagagggtgaaccagagacaatggacacggagcaatcagagtttattctggagctgagagccatagtcaggaatgcagatttaggtcaccccaaattccatcttccaacatggaagttgtctcatgaagtttttatagtaacaagacaaagagaattaggaatcatgacgcttttcaaattcatcagtgggctcgtgaattaggtggctacagcaaagtgggagaatctctgctatgggcttcagatgctagctgacagctttcttaaccctttgaatggtggaaaaataggggcttgttaagtcaatactttccagaaggtttatatctcttagccactgaattttataggtggccaaggaatggctatctaggagagtcaagatcacctgtaattaggctctggacctgcaacattgtagcctttctacatcggtggtgatgttatcagtcaatcaggttttgcagacacaaaattctccttcacaaggacctgtttcaaaacacagcggaaggggaaggtcagcagacacagttgtcctctgaaacccctgcatgcaagccgtggcacatggatgcctgctccaaagtgataggaatctcctgtttcaaacattcctgctgtgtgtagtggccgaagctctgagtcaaaggaacttcagactaccctgcctctctgccacagctcctttcctatcttttaggggatgtggcttgaacccaaggtcccttgctgctgagcaagtgccatgccactgagtcacacctcccaccacgcacccccacctggtgacacatctgctcataaatggaaatattagggctgaggtttctgtggggctcctgggcccacactttcacttctctcagctcccttagacaacccccagcccatgagacaaagcaccccccattcaggctggggacatagctcagcggtagggtttttgctggacattcatgctgtcctgggttccattcacagcaccaggaaaggaagagagagagagagagagaaaagaggaccccactcaccatccttcctgagaggggtccggagttgggtcttcatgaatatgtaaatcagccatgtaaatgatgcttacttaatatgcactatgattgggacctagggattctctgctgcatgcttacagctgcatctgtcactgcccaagcaggcgggtggagctgccctgcctcacacagcaagttcctccagcggatcaaagcgtgggtaccaaatgttcagtgatctggtgcagtgtaaacacacacaggtgctgcttaattttctagaactttctgtcacaaatcatagatgctgatttcagatttaaatgagaaagcagttgatccatggtggtcaaatttcaaattaacggtgcatccttccaggaagcctttcccaggatagacaaatactggtaaatacaagaaatcatgttggtccttttcttttgttttgagatggggtctcccatagtccaggctctaacaacttaagtataactgagctttcccatacaagtactgtccaggcctcagccttcttcgcttccgtggtcagatgcgatgtactgtgttcaggggctatggtcataacggaaccaagttctcaacaactcagagctgactgtgcagccctgggtaagccagcacttcctcctagagtagcttgcaggccactttctcagcaaacatatgggcccatgtagagaaaagaaacactttagccacttttatagtgaggtttttgtgtacacgtgctggggatccagccgagtctgggcctcagttccaggatctcacgcaggctaagttgcccctctaccattgagctgtgcccttagctccccacagttaagttttgactccagttactaggtcagcacctgggtgtgatgacacacagtggcaatcctgccactaggaggctgaagcatgacaaatgtgagtttgaagctagcctgggccacatagcaagactgtctcaaaacaaacaggtgaatgtgtttcttaagttaatacacagcaatgtctgagtgatatactcccaatagatggggttctagcccctcaggccccagaactgctgtcacccgtggctggacaatcacagcaatctcccataaggtccatggcctgcttccagagtcctcttgcattgctaaactcagtggctaagagatataaaccttctggaaagtattgacttaacaagcccctatttttccaccattcaaagggttatgaaagctgtcagctagcaatgcaacttgaatgaacaaatgaatgaatgaatgaatgaatgaatgaccagataaacccactagaaagaggaggaaaggaaggaaggatgggaaggaggagggatggagggatggaggaagatgatgcccagttattattctggattattggagccatgttattcatcttcattgttgggacacatgatgacagtgtagtattatcttgtatcatgctcctctcggtgctggggtgccattcagaggctgtgctgagtgttccccattgccacaggcttggagtgctctgtagtagggagcctgttaggtgagaacgataaatgaggtgcagtggggtgcaggggccaggaatcagctgtttcctgatccaaggccaacagcatccaccacccatgctgctccatagatccgtcgtgccatttccattattctcacagttttccttcatagattccctaccctgctggtccttggattccatgtgtgctctggctaagcaccgtggccgatgagccagggagaagctgaggacccaagtactttcactcaaggctgtcaggcaggctgggaaagtgaagacacctgcggggctctttccagcctcagctcctcctgtcttccctctgttggctacaggatgggatgcgtgaagtccaggttcctccgagatggaagcaaggcctcaaaaacagagccaagtgccaatcagaagggccctgtgtatgtgccggatcccacgtcctccagcaagctggtgagtacggcatcccagggagctgccacagagactttaaaccctttcttccccaaatgagatgacacccacaagccacctacctttaggatgctttccccagacgtggaagctgcttcttacctggtggccatatcctggccctgggctctgcctctcagtcaaatgagtgtgttccttgtgttccttcagcctgggccctgcagcactgcagcagcatgcaagcagacccatgatgacagaggtagcatggctgtccatctgccctgcaacagcaattgagcaaggagagcagcagggaggctgagggatcactcagtagataaagaactattgctcaagggtgagggccagagtttgaatccccagcaggacctataatcccagcacacagaggcagagacacagcacctccagagtaagctggccagaaagtgagacatcctgcctcaatatgtaagactgaaagtaatgaaggaagacatcaacttcgggggctccacacatgtatgtacccatgtagacacatacctgtgcacagatgtgcatccacacacatgtgaacacatataaacagacatcatatgcatgcaaaacaaaaaaaatcaatagtgactattttggttacttttctattactgtgataaaatgccaggaccagggtagcttgtagaagaaggagtttatttaggctcacgggtccagaggcttagagtccatgatggtggagcagagccagccgctggcagccatggcagccggggcagcagctgagctctaacatcttgctcgagccatagagaaagaaccagaaacagtatgagtcttttaactctcaaaacccagctcccacccccaatggcatgcttccttagcaaggccacacttcctaagcctcccaaactggggccgtcagtttgggagccaagtgttcaaatgcttgtgcctatgtggaccaccatagtggcggtgggagcatcagtgagagcagtcaagagaagaaggtgtgattcctgaagggaagaggtagctcagtccatacaatgctttccacacaagcataagaacccatctccagaactcatgtgtaaaaaaggaaagaatacagtgaggggaagggagggagggagagagggatggaggaagggagagagacagagacagagagacacagagagacaaagagacagagaaaggaaagagagagaaagaaagagagagggagagagggagggagggaggagagagacagagagacagagatggagagacagagagaggaaagagagagaaagagaaagagagagaaagagagcgaaagaaagaaaggaagaaagaaagaaagaaaggaaggaggaagggagacacagagacagagagacagaaatggagagacagagacagagagaggaaagagaaagagaaagaaagagagcaaaagaaagaaagaaagaaagaaagaaagaaagaaagaaagaaagaaagaaagaaagaaagaaagaaaggaaggaaggaaggaaggaaggaaggaaggaaggaaggaagacgggccagctatggaggtacatgcttataatcacagcagtggagaggcagaggcaagcagattcctggggcatgctgtgagacagcctaatctaatccgaggatgttctgccagtgagagatcttgtctcaaaaaaacaaaacaagcagactctggagaaggaatgacctaacaaagaccacgtggttggcaggaacataaaagtgagagttgttgaggcagaggtgaacgctcacaccaggtgctgtggttgaggtggtcatagggtaatagtggtggcagccacagcacacagccactgagagcactacagcaggaaatgacaggagcagtggccatggctgtacgcacagctgcatagcaggtgtaattgttagtattgtctccaggctcccactctgtcctgggcacatggagcaggtgtgtccccggcaatcttcacttggaactgggaagcaggaggaaactgcttgccatcagggttcaaagaatcttggtggttctgggtgaggagatcaggcagctgagaagccatcgagtccagggtctttcaactccaagcctggcgctgtggctgcttggcagcccctgatcctttccttcatttgtgagtggcgaggggagcccaccattcttagtgctccccaaagtgcagtgcaccccttcatcactggtcccttaagaagttcttcctggggtctggagagatggctcagaggttaagagcactgactgctctttcagaggacttgcatggcaactcacttctttctgatccaacatgctcacgtagacatatgcacaggcaaaacacaaatgcacataaaatattaagtaagtaagcaaataagctcttcctaggtcagtgagatgggtcaggagtaaaggtgcttgcattgcaagcttaactgcctgagttaagacccacataaagatggaaggagagaaacgagtctaccggtcccttctgacaggcacgtgtgcactatgacagcagcagcagccacacttacacatcattcactcacagaataaacatatattttttaaagttcttcctcatgttaaaaggtcaattatgcatagcccccctttctttatcccatgcctgcccccaaacacatccagtcccttcacacagtgatagcccacagactgaaggcaaaatcaaactcgagtctagcccttcggagccctctttttcaggacaggaggcctagacttctgtcccacaagtccttagtctctaaattgtgaagctcagagcaggactctgcctgagaaaggcaggagactgtcataatcccctctctctttgcacttggcctcccttagcacagcctgtggctatacaaacttctcacactgctggtatcctgatctgggtagtgttgccctaagaagccatccctgggtcttctccggcctgattctgaggacagctgaaggggtgcagttgtcgagttattccctcctgtgtggtgctcgcccagaggtggctgtaagttaagaaagtatgtctcaggagaaggtgttcccaggccaaatctgtttgagaaacccaggatgacacaggcatcttacaaggacatctcagaacctttgagagtctttcaaaacaaaacagaacaaaaaaaacaagcatccctccgtgcttcctcaaatgtctaacagcatgtgtgacatgaggcaccctcttattgacgatgagaagtcatgaattatggagccctgcaagtgccacatcccctaaaagcaacaatcactgtcagtttgctgtggacacataaaaacccttttcggtggattttaccaccacactacaaacacgtatccacaggaaatacatatacttgctttatatagacataatgagttgtgtgaatgcttgctttggaagacaggctctcactgtctagtccaggaggatgcttggcactcacgggaatcctgctaggttcccagtgctggcattacatatgtgcaccaccatgtccagcttcaggaatgtgatggtcagcagaagtagccattttcacccaggaatttgtgtgatctcatctaagtgatacttggagacctgtggttctgatggcagtgtccctttgtcagattgctccatgcacatgatggagtctgtccgtgagaaacctggtaaacccaagataccttcagacatctctaagcaacacagatctggaccagttccctcactgggtgggaggatcaacctagcccttcccagtatttcaaggcaagggtcccgatcacattttaagatagctctatccatgtacagactctgttctttatcatgccatgtgaccctgcctatgtctgtaattctctcctaccaagacccaggtgggttgaaaagggtgaccttttcaacacaggatcctcacaatttcagactcatgtccttttcctgtttcttcctgcagggaccaaacaacagcaacagcatgcccccagggtttgtggagggtgagtatctggaagcttgggtctcagcatcagatacatccattagcttagattctgagttgtaactgatgggggaaagtaaaaaaaaaaaaaaaaacaaacaaaacaaaacaaaaaacctctgtacttggcttttgtgaagttgtgattaatacactctgaccaaaagcaacttgggggaggagtgggtttgtttcatcttgcagtctgtgggtcacagtctgtcactgagggaagtcagagtgtcagaatgggaacccagcagttagctagagacaggaactgaagcagagaaaaggtgcttactggtttgctcaacctgctttcttatacaacccaaaagcagctgttcaggggaagcacatggttcctagtgggccagccaaccaccaattcctccacaataaccatcaatctagaaaaaaaaaaaaaatccctgcagacttccccaccagtcaatctgattggcctactctatctttgaggttccctcttcccaggtgactctaccttgtgtcgaggtaacaaaaactaaccagcacccttgtatagtctctaaattacctgagctccttgcccgggctcttgtctttctagaatgctgtccagtggtgtgaacagagccctgaaggctttaaccagcacaggccccagcacagggggctgctctggtgtaaaggagtcgggaactggggggatggcacggggacccatcctggcatctcccgtcttggcaggctctgaggataccattgtggtcgcactgtacgactatgaggctattcaccgtgaagacctcagcttccagaagggagaccagatggtggttctggaggagtgagttctagcctggtcccccctgagacacacccacctgcagggcttagctacacttctgttttgcatctttaaagagcccaacagcctaattctgggagtaaatgatgagaatctgactgcacaccatataggacctacctctcagtaacaaaaccagagatggaaactatgtcctctctgacaggctctccacaaagccttcctaagggatagaggcctaagtgtctgggctccaggctgccctgtgggcctggcccctttagcaatcccagggtctctgagctccccacctgtgatagtcagtcttcaccatcaggacctcttacaagagttcagcttgtactgagatctgggaatgataccttgtcatgtgtagccaaactcttgagcccgcggccttctccttagggccgcagctgaaccagtgtgagtgcttccaggacacaggtcctggattgggtcagatagtccagccaaggacacaagtccaggaaaaagaatggatccaaagacccagactgtggtttcagcccagactcctgtggcgactcctcagcacgtgctaggttcccccgcccctcatgctcctggcttcctgagggtgggaaggagagcttctagacccaggtggggggccacagcaggctgtagaaggttcctgtgccggctgatcctctctccctccttttccttagggctggggagtggtggaaggcaaggtccctggctaccaagaaggaaggctacatcccaagcaactatgtggctcgagttaactctttggagacggaggagtaagtgttccagttctgccttccagaaggcagccagagcaaaactggcctgccaccttagcatctctgcacacactctctcccctgtctggcaccttctgcctggggctcttggcttggctgggtcattcccatgcttcaggtctcagacctgttcaaaatggtctctctgtgactctctcagagaggtgtttttacttccttctgaatatatcccacaggcaaaaggggacgttgcttttttttttttttaattgtctgcacatgcactgtctgcctcccttcctcttgagtgttaagctctcacacctgcgctctggggttagactgcctaggttctcatcctgactcttccacttccatgctgtgtagccccagacaagccccttatcgtctctgttctctgctttgagcactataaaataagaagaataaaggcgatgatcacatataagctcttgatgagttggggcggaagtcaatggttaagaacactggctgcccttccggacctgaacatggaggttcacaactgcctgtaactccagctctaggggatctcacacccttctggcttccctagaagccacacatgcccatgcaagcacgtgtgcactcacacacacacacacacacacacacacacaaacacatacatataagagagagagagagagataattaatatttttttaattgacaaatggagctaagcttaggtggcacaattctttaatcccaacactcggaaggcagaggcatatggatctctgtgagttcaaggctagcctggtctacatagtgagatccaggacagcagagctatataataaaatgctgtattggggtgggggtgagaaactatgaatgttaactatctttctcccttattgataactgaggcagcagagacccatagaacaaaagtcacctgacaggcatgctgatatctgttcaggactctctccccattgtggtacacagactgctccttattcttgtgaggatgaaaagaacttcagccactacgacatgaacttttccataagtatccaaaatagcaaagaagaaaaaaaaaaaaaagattagctctttcccactaacccaccccctaaaaagtaagaaaaacaatgcttcttgaggtcaggtgtttgggcccccgatctgagtgggctgtgctctgtatggcctggggcagcacgtgagcagggcaggctggtccatcctgagtcttacactgtccctcattcactcctgacaggtggttcttcaaggggatcagccggaaggatgcagagcgccacctcctggctccaggcaacatgctgggctccttcatgatccgggacagtgagaccaccaaaggtgatgccagccctccctcctcctgtgcccaggcaaggcgcctctccgatcctagggaagtcctctgaggagggttgaacagctcagtcaagtgtccatactgccaagttttttcctgtcatttgctgctctgagcaagaagagggttaagggcctggactaggtagcttcttctagttctagaagatgcaggcttagatcatcagaagtggcttgagcccccaaagcaagcaaacatcatgctgaaacttggtccccactagatcctcgtctgttttaaatagccacactactttgtcctgtccacaagtcccattcctcccaggagaggaaacagtgctatgtgagatagaacttgacccaaaacagagcctggccctgtgcctctgagactcacctaaaattctctatcagtgggggaggggtagtgagatggcttagctggagatgccgaggtcatttgacaagctgagttccatccccaggacctacacaataaagaggaaggaccaacagctgaagattgtcctctggcctctacaagcatgacagtgacatgcatgtcccctaccccataagatgtaagggaggaagctcttttgtgggcatgtggatgggaagatgtcattggtgtcaagagtcttgtccccaaatctccgtgttggcaaagagtcatatggaatgggtgaccagagtttaaaaataaaataaaaacaccgcaaaggcaggggcatctctaagttcagggccagcctggtctacagagcaagtaccaggacatctagggctacacaaagaaaccctatctagagaaaaagagtcacctcgaaccacatagactggttccgactggcattcccatgggtgagtttccccagggcagcaatgccacatgctgtgtgcatgatttcagattccacatgcacagtgagcctttggctctttgaactcagaccacttgatttgaacaggccaagccagctgtataaagtgtgatctggttggtactatgaggcatctagtttgggggacatcaaaggcatctgagagtctgggaccagccatttggtctctgtctgaggtctgtgagcatttaggctgcagggaagcccagcttgtctcccgctgtgcctagagtagtttagagattgacctgtctagttctactgagaggcaaagaaaccaacagcccagtggcagacctgtggacaggaaggtgggctggactcgcttccacagccccctggaggagggggcttgctggggatctgcctgatttagaacacggtcccaagcacttggctgctttccagatcctgcacaccctgtctagcaccaggtacaccaggttccccttgactgggataggctaagaaggagccaaccggacagccttggaacccaaatgtgctacttgccagctgtgtgactccaagtgagtatgtcacctataaagtgaggctgatacatctataaagcatctgcctcgtgagactattcactatgatgaatgatacgatccaagtaattttaattgatgaaaacgcacactgttcctgtcattcactgttcatttggccagcatgcttagaacagcttggcttgttgtcagttgtcattcaacaatctaaacttccctcaatgacattgtgctattataagaaggaggaaatatgaaaggcagagaagctaggtaacatagctcacacgtggtggactgcggccacagatcggaatgcttgtgtatctctggtctgtgtgacaatccaaatcatagattactgtaagctgggcagtttagagccacacatctgtattgtctctcagttctggaagccaagagtctgagtttgctggtctctggtcaagatgtctgtggggctggctcattttggagtcttgtaggggcgggggcagggctccatttcattttctgtccttgtgggctttgaaaggccacaagtgctgcttggctcatggctgttcctctccaacacctatttccactagcatgttcacaaactgagtccttttgttaaggacccctctgagttccctggaacacccctggacactctgtcatgtaaggtcacatatttcccagctgcaggtgttcatataagagcatcctggatactatgcagctgaccacagtgcctattttcacacttcagtaatcagaccagattttctttgttctttttatttgtatgttttcagtttctctctctctctctcaaattagtatagtatcttggctttttcttcactaaatagatacagacagataaatggtatagaagatagatagatagatagatagatagatacatacatacatagatgaataatgatgtgatagtgacagtcagcttacttttccaagtcacttacaagtattacttctgttaatcatggggcaaactgatgagatggaaaggcataacaactcttattttacaggcgaggaaactgaggcataaaaaggtccagtggtcatttggtcaagggctcacagctgagaactgcagagctggaatgggaacccaggcagcccaatgcctcagcccactcttaatgaaatgagcttctgcccaggtagcacatgcccagctgtgccaggagaggcctgcggggcatcataaggatgccaaggtactgacatcaggtagcaggcttctaaggtgccattctgaggggcttctcttggaccaatacagggagctactcgttgtctgttcgagactttgacccccagcacggagacaccgtgaagcactataagatccggacgctggacagtggaggcttctacatctctccaaggagcaccttcagcagcctgcaggaactcgtgctccactacaagagtgagtcttgctcgaggccacgcctccacatttgactgcagagcctaagctgctcctcactgcacagtgtggccaggctgtgaagcagtcactagccacagcttttattcctcagcaccttggctttgctttgcaatggttgtttggttctggagaaggagagtctactgcttgctaggcaagtactgtatcataccacgagcccccactaggaggggcctgtctctcagaaccccagtggcatgcagctctgcactcagacttcctggcctggacaggcaatcacgctgggcacccctgaaggtttaggctggctggacatgagggtggcggtatacaggtgtcattcatcatgctctgcgatttggggaatgtcccacctgctgactgggcactctgtttcagaggggaaggatgggctctgccagaagctgtcagtgccctgtgtgtctcccaaaccccagaagccatgggagaaagatgcttgggagattcctcgagaatccctccagatggagaagaaacttggagctgggcagtttggagaagtgtggatgggtaaggagctggggccagagtccataaagccagagctgggagggccctgagggtacagggatatcacccagcagtggggaatttaaataataaccacaggaggccactcctcagatagcaaaccaaattgtctactgggaaatcactagtttgcctttgtggccaggcttaaaggtcaaagaactgctcgagtcctggatgggagttgtatggagttgggaacaggctaccttgtggggctagcatactcagggcctcttgtgatggtgaaaattcatagtgaggggaaaggcttgggttttcaggtgagtccaatgctggcaactaaagacaaagctgttcagatcatgagccacaatgtccagtgacattccaggcatgatgggacaccagaaaggccagcacacccctgtggtccttggcccagtaccttgagaacaggagaggtagatggtcacaatacctgatccaccatgttaacactcccctgtgtggcagatggaaaggacggagcttgtagagatgcaaacattcagccagataaagtgagttttgaaagcctgtggctcaactacatttaccaagagccctctacatgccaggtgctgagtaaatgaagccataaggaagtgcaaggaagaaagacagatctgagaagcaaagctgggacaaacaaaacaaacaaacaaacaaataaacaaaaaactgtcccatgagacccccatgctctcactacaaacaccacagatctggatttgagcttcctggcatccaagatacacagagaaagaaaagcatgtataataccagagccactaaatgaagcagggtgggatggagcaagagaacagtgtgtggcaagtccctgcagctgaggacttgagggtcaggtgtatgcagggtggttaatgtgtaaaagccagagtgaggccagagagatggctcactgggtaagagggcttgctgcaaacacctgatgatctgagttcaaacccagaaacccacactgaaaagagggaactgctggaaaagatcatcctctgacctacacacacgtgcacacacacatgcacacacacgtgcacagagagagacagagagacagagacagagtaatttattttattatttttttaaaagaaagtaagagtgaatttattgagtcaggcctagtgatatatgcctaccaacccagctatatattgggacaggaggactcaagttcaaggccaacctgaacaacttagtaagaccctgcttcaaaataaaacgtgagaagggggctgggatatagctcagtggtagagcactttcctagtatgagaccctggttcagtctctagtttgagcatgtgtcagaggtgaccttggtgaatgacaaggacaaaaaagtaggtgtgatcaggccaagcagagcctatggggcataatgaatctggtaattgtttcaaggcaatgtttaagcttacacgctatgcaggctcgtgttacagtctaactggtggcttaatggttactacccagggattaaactcagtatcctgtatgcgttaagcaagttctgtgccattgagcaccagtctcaactcttgtcttctgagtcatgggctggcccagagcctccagtcctcctacttcactgtcttgagagtgacaagtgtctagaatgacaggcatgtgccccaagcccagactggaggattttataagtcttgcaaatagcccttcagtgagagcttatcccttccacttagtgggtgaggaagacagcccagagaacttaggtgtttcagttgtactcagctaggcagggaaccaggtgtccaggcaactgtgctctctctctgtcttaaaggcttaagatgggcagggagggctcctccagggctgctgggtcctaaccaccctccgtgctccatgctttccccagccacctacaacaagcacaccaaagtggcggtgaagacaatgaagccagggagcatgtccgtggaggccttcctggctgaggccaacctgatgaagtcgctgcagcatgacaaactggtgaagctacacgctgtggtctctcaggagcccatctttattgtcacagaattcatggccaaaggtgcgtgggcagggttagagtgtgggccaagctgactcctttcagtctccaagatggccttggcgtggctcttctggcacatccacctcatagagcacctacactccagcctcctggctggcagagtgcaatcctgtgaagggagctcggtggagaggaggggcagaggctgcagagcctctgggcgacagaggaatcacatggcttccttgtgactcatacctgggaacctcagtgctgggctgtaaagaagtcttgctccaaattctaagggacaagaagccacatggagaaagaccataaaggtgccacttcatcttgaatgttccacctgtgtcacctcacttcacagtgtggttggtcctgctatgaccaacccacagaatcatgacaatgtccgtgttgtcacttcaggctacttagctttgggccactgtatcctgggattattcagcatatttcaagaatgtttgagaaaggattccactctgtagcccaggttgtcctggcactcattatgtagcccaggctagcctcaatctcgtagctgtcctgcctcagcctctcaagtgctgggattacagatgtgtgtctccacacccggcttctcagagttagttagttagttagttagttagttttagaacagctggtttatagtcattttcagtccctggtcatttctggataaacatctcatacaacaacatccaatgtgacttgaaaactcaaagctttttctacttttcaagtctactttacaaatctacaaccagccagctttctaaagcaaagccctggacacccaggtccatggggccgcatcaaccaaagagttagtaagcaactaaaaagtcctttcagaaaaattcaagctctagcactcagacactagaagcagtaagtagatgtgtctttaactagcactgcagctgggcggggataaatgctgggagtcaagactaatctactagctaaagtggaaaaatagctggagcctgggaatcggagaccagtctgaacaatataacaaggcactatctcaagaagaaagtcatacctggcttgcctttaatcacagaacttgagaggcagaggcaggcagatctctttgtgagttcaaggctggccaggctggtctacaaatcgactttcaggacagccaggatgacacagagaagctttgtctcaaaaaacgaacaagagaaaggaggaggaggaggtggaggaggaggagatgtaactcagtgcttgcctagcatgtgtgaggctctgggttcagtccctgtactgcaaagaggaaagatctctattgctatgaaaaactgttacttatttctcactaaggagcagtagtccatgttccttctcactcccctctgcaggaagcctgctggactttctcaagagtgaagaaggcagcaagcagccactgccaaaactcattgacttctcagcccaggtgagttgtgccagcgatagtcaggagaggtgacaggaaaggtgacgtcatttgtgttctctgtgtctttcatgtgaatactcatgctccccacacacaaggactagtcacagtactccaagtactcaaagacttctgtatgctaaagtcccttatagaaaatagtatatttactgtaaatatactattttccctaggcacattcccctgcatgctacttaaagcatctctagctggcctatggaatctaacacaaatgctatgtaaacagttattatttcgtattgtataagagataatgaccacttaaagtctatagacagcatttgatttagaatattcttgctgtgcggttggttgcgtgcagatgcagaacccatggatacagactgttcttcatatgaaccaactcatacagtgctgacatcaaaactacggaatttttcataacaggttaattattttattatatgggtcttttgcctgtctatgagtctgtactacatgaatgtctgctgccctcagatgtcagaggagggtgccagattctctagagctatagttataggtgcttgtgagccaccatgtgggtgctaggactgaatccaggatctctggaagagcagccagtgctcttaaccactgagccatctctccagattctgggataattttgtttgttgatttttggtgtgaggaatggaacctggggccttgtacatgccaaagaaggactacatttgagctacgtcaccatccatgtaagtcatccattcttatgtaacagataaaggcttagtagcctgaaatgataacactgaatatttcccatgattctctggactgactatagcaggctagatggagcactctatgcactgaggtggcgtgaggagcatgtccaaggtgacgttcattcttacaacttctccctgtgtagcctctcagcactcagtatttcttcacagcccagtatcagagctccaagtgggacctgtccaaggtacaagcagtgggtaagcctctgcactgacttatcaatgccctattggccaaagtcagtcacagcagccaagcccagagtcctggcaggcaaatgtaggaaggtaattgtcattctgtcgtcctacagacctgaaatggaggtatgaagaatttaagtacaaactgcgcacaatggtgaatgactgtaatcgtaacagtcaggaagcagagggaagatcaggagggccaggctagacttgagctgcagagtgtgtcattaaaaaaaaaaaaaaaaaaaaaaaaagtgaagttcagatgaggaaactgagcccagggaggctctgcagctggcctaagctgcagggctgattagaaagagggggtggctcccacaataatgacaatggcaaacatcactggctttatgcagtttacttgtagatgagaccacaggcattaaaggaagggctctcttaaaggcccaccacctccccccagggccctggctctgagtctgaagagcaagaattcagcaaagagaagggggctatgtaagccgctgggacacatcttaaaaccccaatttaaaataaataagcaaaacaaaaatggttcagtcgtccagagctttcctgggtgcacacaccccgggttctgttcccaacgttgtacaaagccagctaacattctttctcacctgccccatggccacattccatgcacaggcagtttctaccaactcctgctctctgctctctggggggaaacctggtggacagtggtgctgtaggaatgcacagcctggtccaggagccatcagagaaggcttcgctgaggaagaggtctccagttccaggagcttgggggttagaaattccacacatgccgaggataaggaaggcattctagacaaaaagaaacagcctgttcaaaaggccaaaaaggcaacgaagtggctgagcctggtcagcctgagccagacagtggcacagatgaaagggatgtggcatacagcccagtgggaactgagaatttgcggctgaacctagggttgagcttggcggagacccaggtcagagctcttttgagtatgcaaataccaggggctcagatcccggggaagtctaagcagaggctctactttcagagccctgaatgccagaggcatatggaaatcaaggccgggcacttgcatctcagtgggtcgggtcttctgggaaacaatggtctggcctgttactaaagtataagcatgtaagcagctggagctttgctggtgagcaagagtcaaaagctacagcaagagcaaatcctgggggctggagaagtgactcagtgggtaagagcactgactgctcttttgaaggtactgagttcaaatcccagcaaccacatggtggctcacaaccacctgtaatgagatctgacaccctcttctggtgtgttagaagtcagcttcagtgtacttatgcataatagtaaatgaagctttgggccagagcaagcagggactgagttagcggagttgacaggagcatccccaacaaccacatgaaggctcacaaccatctgtacagctacactgtactcacatacataaaataaataaataaatcttaaaaaaaaaaagaaagaaaaaagaaagaaagagcaactcctgcagctggggaatatggcttagtcaatagtgtgcttgcccagcgcacatgaagtcccaggtttgatcctcagcataaatagtcagtgttatcatttcagtatactaagtctttatctgttacataagaatggatgacttacatggatcgtgacgtagctcaaatgtagactccttctttggcatgtacaaggccccaggttctattcctcacaccaaaaaccaaccaacaaaattatcccaggacctagagagatggctcagtggttaagagcactggctgctcttccagagatcctggattcagtcctagcacccacatggtggctcacaagcacctataactacagttctagagaatctggcatcatatgaagaacagtctgtatccatgggttctgcatctgcacgcaaccaaccgcacagcaagaatattctaaatcaaatgcagctttcaagtttgatatctctttttagccccagctttattggtgaaataaaatttcatacaatagattttaaaatatatcttggggtttggtttggtttggttttgttgttttgttttgttttgttttgtttttttgagacagggtttctctgtgtagccctggctgtcctggaactcactctgtagaccaggctggcctcaaactcagaaatcctcctgcctctgcctcccaaatgctgggattaaaggtgtgcgccaccacgcccggctttaaaatatatcttaatagagctactcctaggttggagagatggttcggtggttgagagcactggtggctcttccagagggccagggttcaattcccagcacccacatggtagctcacagctgtctgtaactccagctcctggggatccaacaccatcacacagaaatgcaggcaggcaaaacaccagtgcacataaaataaaaataaatagctaggcagtggtggtgcacacctttgatcccagcactcagaaggcagaggcaagcagatctctgtgagttcaaggtccacaaaatgaattccaagacagctatggctacatagagaaaccctgtcttgaaaaactgaaaataaattatatttggagagagaggggaagaaggtcttcctcttgaaggaaagctattcctattgaagttggcagagagcagtattatattattagagacacatacacacttattcatactcactcacacatacacactcacacacagatgtatgagcactgtgctggtatctgcttaccagttctgtgattccctgatgctccttggaagcagacccaagttctagtacctggagacctgccaggtggttttgaaaccacatcagcttattaccatcaggtcccagggtgtgagtgacatgcagggtgtttgtattagtcccagatctgccagtgcggctctgagcaaggcgcttggctgctctgatgacattactagccacctctcaagtgaatactagatggcagacactgtccttgcctgtggtacaagcttaggggttagtctccctatgagacctgggagacaggcttggagtcacaagcttggggatcaagttgagctggtccaactctggagccacttagccatgatgctccattgcctcccaagtggagttagcataccttccccattgagctcacataagcaccagcgatataggtgtgtcagccagtgggaaagtactaggcacagaggttggtaagagacacatgctatgcagctatgagctggttatttatgactctggaccctaaccctccccgagcccatagtttgaacaaaaagcctgccgtgtttatcagtttgtattaactaagctgcagtatcttcctagtaacttcgcaaactgctcttctgaggatgccctgtaaatttcccatgctctccagaccccgtctcactccgctacaacctctattccaggcaaaaatcactcttgagatttcattcggaaagcttggcttatttccactgcctttgatgccccctcctgttcattctttgctattgcactacctggttccctcgggctttgcgtttactggccagctctgttttaggctgtctgatcagactctgccactccgggttccccagataacctcatctgataattcctgggtgcaagcctccagagtcctgcagttctggactgtctggagccagtctggtttaaagctgacattcaggacacgcatctctgtaaagtgggtcacaatgagtctgccttcacagagctccaaggtagttctgcaaactgtccatgaggctttctgggcaatggagctttatctttcacctcttttgtcctaacagccatgtgtctttcttccagaagccttaagaataagaatccttcacactgtcttggagccacagtggtccttaagttatgctacactgaagggcttcgtgaagtctgccattatcattcttcatgctcagagtaaaattcctttcctaccttcgaggatgctcagccttcccaagctcagatttcccacctctgcttagctacctggctctatgttactctaggatcgctggtcctcctgcctttgcatgtggcagtctccctgcctgcaatgttcttattcaacacacttatgattgtggtcgtcccattctctgctaaaatgtcacctcccccaggcagtttccatgaccatccaatggaaccttctgcacttccctctggtaccccgtcttgccttttctctgtggtggtcatgccggcaatggctgtgcctacctcctgttcaaaggactggataggcactcatagacaatctgaggatttttgttggatgagagggcgaattttccaggcttgaggataaggatgatgtaagagtgaggagacaagggctggagagttggatcagaggttaagagcactgactgctcttccagaggtcctgagttcaaatcccagcaaccacatggtagctcacaaccatctgtaatgggatccgatgccctcttctggtgcatctgaaaacagcaacaatgtactcataaacctaaaataaataaatctttaaaaaaagaaaaaagagtgaggagagaatattgaggtgaggttgtccccaggagggtgggatcaaagctctccctggtacactcatggacgtggggcagagggtcctggggaaacattcacattgcttgttccttaagaacatctcaaagggctctgcagaagtttgatgttctaaaagagcccacaagcagagccaggacttgagaataccctaagataggcaggcagaacagtgccggttgagagcccaggatccttctgacccccccccccaaatgcagggctgatgcagatgtcttccagttttttaagagcagattctgtgggcttctaatatgtgaggatgacactgtctcttctgggtacagatctcagaaggcatggccttcattgagcagaggaactacatccaccgagacctgagggctgccaacatcttagtctctgcatcactggtgtgtaagattgctgactttggactggcacgaatcatcgaggacaatgagtacacagctcgggaaggtagggaatgctgccctcctggaaagggcagagatctgtcctagactgactcttgcatcaagtcaggaggcagacagacagatgctggtgttcgtctcgatctttcctttgtcatgtggtccacagcccatggaaggctctacccacattcaggatgggtcctcccacctcaatgagctctatgtagaaagagtccttcataaacacacccagggggcgtctcctaggtgattctagatcctgtcaggttgccagtgttaataccacacaagacttgaagaggaacatttcagagcaggtcggtaggaagacttcagcaagtgtaggtcgcggtgagaggtgagagtaatgtcatgcccaggaaacaaaacaagaaccatgtgaatgtccacagacagggtgtgcgtatcagctgtgacacacacacaatgtagcaccacgcagcagttaaggacccacaccaggggctgggagtagcattcagtggtggaggcctcactgacacagaagagtatagacttcacccccatcacaccacacaccaatgccatgggcaactaaaggggaggtgtgacatccagatgaaagaagtgaacctaaacagagtagatgccagcaggttctacatcatggaattcaaaaccaggcaaaagtcatctctgaaggtcacagtgttcttcatgatcgccccagacttaaacactgtaactgatgcccatcagctgatgaccagagggagaacatgtgggcatccataccacggaatagtgtctgtgtctgtgacagaacagagacaactgttggaaaccctgggagcatgctaagtagaggccaggcaccaatatctgttacccttgaaatgaaattcccagaatggcgcaggggttgccaagggctgggtgggagactcaagaaaggggttctgagcgccagggatggggctggataacatgtgatgaaacattgtgcaattcacaattcttccgctattatgaaagtcgtcaggaactgtggtggctgcgcctttattcccagcactgcattcaaagccagtctggtctgcagggtgagtttcaggacagcctggacagggctacacagagaaaccctgtctttaaaaaaaaaatcattggagcatacactttaaatgtgtggattttatggcttgtgcattatatatcattaaagctgtaaaattcacttataccaacaaagctgtgaagggaggtggggggagtgctagctgaagcagggaggtactgcctcagaagagctggaaggagccttctgaaggggctacttagctacagatcatcaaagtcagaccttaagcatctgtatactttagctgggtctagaagtgcaggcttgtaatgtaggctactctggagacatatcacaagttcaaggcctgccagggtagttactgaccctgtctcaaaataaaaagtaaaggggctgtggttctgtggcagaacacttgcctgacatgtgtatggtactagactcagtctccagtaacacacacacacacacacacacacacacacacaccattggatatgttatgatttgatgtttaaactaggtacaaaaaataaaatgaaaagttggatatataatctaaatctgtaaagaataagtgggatatggagagaactctctagatgtggctgaggatgtggcttggtggcagagtgcctaccaggcatgctcaagatctgggtttgagccttagtaccacataaaagagaagtatgacataaagaaaatggctgacttagagttgggctgtgaatcgcagcatgcaggaggataccatggagccaacccgggatatggagaccctgtctctcaaaaggaaaggagagtctggagagatggctctgtggttaagagcacttgctgctcttgcagaggacctgggtcctggcactcatatgtcggctcccaatcatctaaccctagttccatggttccaatactctcttttggatgctgagggcaccagacatgcatgtggtacacatacatatatgcaggcaaaatgcccctatacgtaaaataagtcatttcaggaccagtttttaaaaagaaaaagagtggcaaattggctgagtgaaagtgcctgctgccaagcttgaggtcctgagttcaagccccaggatccatgtagtggaaggagagcactgactcctgctggaggcgtcctcaaaccctgacaaaaactgacactcccacccctagcagccacaactgctcagttaggggtgggacttcagaggccaacttctcatctctgataggattttgtccagttgatcttgtgctggttttgtgcaggcagacatagcttcttcgaggtctggtgtgttatggtcctgtcatccagaaaatcctcttttacagcattcctccactgtctatggctttacgatctctctactgcctctttctggatgatctctgagcctgggaagggtgtgtgtgtgtgtgtgtgtgtgtgtgtgtgtgatgtggatatttcctttagggctgagacttgtcaatacttaatcacttactcggccataatacaagcgtcgccgaattccaaagaacatgcagatggtctcttaacttagcggttgcttggtatatggttttaaaaatagctttatgggacacctaaaagcacaagcattttcatcacacaaaggggctagctttaggtgctcaggcctgcggtgggactttaaccatcttctaccacagtaacaagaaaagtgaattagggaacaaaacagacccaaccgagctgatgtgtcatcaccgctgccaggaagttgaaaagacagggagcatgaattcaaattagcatcatgtgacaggggcctcacattaagagagtagcacaggggaaaagcctccattgctagtgtcagcagtgacactggcatctttccacttaggatccaaccctaagtggaggcaacaacagagtcaacatggcagtttggagtggagcaagagtccagggctaagtgtcctcaggcatccctaggactggccttcctctggtgctgctacttttgtgatgaagccagtcaggtttatgtccagctctgaaaggctcccaggcttatggctgtttagggggatatgtgccttatggacattaagccactggagacggtggtctagcctctctagccatgaaaccaaatgtcccactgaagtctttgaaatggaactgcttgcagccttctagctccttccgccctacagccctgcagtttggcaactgctgttcctgcccctcagcactcagcctgttttctgcctgccgtgataaggcatggacaggaggtggcagcagagagtaatcgagagcctggtcatttatctccagtgttctgatggtacagacatagttgcattgagaagaaatgatacaaaggtgggcatggtggtacatgcctccagtctagacactagggaagtgggcagaaagaccaggaaatcaaggccatcctatctaggctatgtagtgaattgagagcctgtctcataaaaatgagtgagtgagtgagtgagtgagtgagtgagtgagtgagtgagtgagtgaatgaatgcatgaatatgctctccctttggattttgatctctttccatgtctagtaatatactgtcctccctcatgatgctgagccagggcagtgagctacagctctgatttagccaagagatcaccagaagaaacaaaaaagaagccatgatatgcagttgctgaactacagtgttcagtaactaagtgttcgaggcatttttgacttctgcattttgccttacagtgagtgtatcgtaatcctgaatcaaggggcagttatatatcctatagaccatgttcaccaattatactttaattaagacaaacacccacagactgctcatcaaatccattctagagggaggaagggaagaatatgaagggacactctgactagggcaaacctcagacgacagctgaagtcctctcctgcatgccatagctggggagtgaatggggtgaggtatcagctgtgacctagactcaagccccccggagatcccttatccccaaagacctctaggtctccacttatcagcgttaacatttaacaggcagcaactgaatcaaggatgtagcccccagagtgagctcccacattatatccactcctctttgatccagtgtctgtcctcaagacaaatgtccctcggtaacatgggatctgggtggggacacattgcaaggaaatcactatttgtagagggcagcaggtgccccgtcctgattcccctcaccctagcagagccccagccctcattgctcctcagtctcaccgtgactctgctctgctcaaccctgcaggagccaagttccccatcaagtggacagctcctgaagccatcaactttggttccttcaccatcaagtcagatgtctggtcctttggtatcctgctgatggaaattgtcacctatggccggatcccttacccaggtaggaaaagggacatgggcttaggggtgtctccagcccaacctggcaatggcccatctcgtcagtatgtctattacacgcagctcttgatctttcccccagtccctctccacctttctcatatcagaggtactgccctccaccatccctcccctaatgtaaggggtttgctggctatctcctctttcccacaccttactacactcaagcaatcaaagttcagctatttgagcaggaggtggatgggaagatctggagaagccagagctggtatggcctggatatgcagatggctgtgggtgttgctcaagtgtctaggaagccatggggatagcatgaggctgagaggaagtcaacttttttttttgagacaaactcttactctgtagctctggctagcctggagtttgatatgcagaccaggctgtccttgaagtcccagaaacccatctgcctctgcctctgcctcctaagtgctgggatgaaaggtctacagcatcacacctggatgatctctacttttaagagatgtatacttgaggctgaagaggtggatcagaggttaagagtacttgctctcccagaggatgagggtccagttcctagcacccatgtggtaactcacaactatctcattctagtcccaggggatctaatgtcctgtgatggcctatgaggacaccagtatacacgtggtgtatatatgcacacatatacatggaggaagaacactcatacacataaaatacaaataagtaaataaatctgaggggcaggcctcagttccatgagaatgggtgaaagtatgtgatcaaggtggcacacgggcagctggggcaggtggtggcacatggacactgaggcaggtggtggcacatgggcagctggggaaggtggtggcacatgggtacctggggcaggtggtggcacatgggtacctgggccaggtgttggcacatgggcagctgggacaggtgttggcacatgggcagctgggacaggtgttggcatagacaacagaaataagctgatgaactgagccacatttcaaaagaagcaaagagagccaaggctggctgtcctgatagtgaagaagctgtggaaatttggggtgattcactagagaggatggccgtccaactaagatatttaaagctttttggttttgctcttaatcactgacccatctcttcagccctaatcacagaagtttaaaaaaatactaaaaataaaagtaaagttggtaaccatagttatttcattgttgtttttagagataacagatgtaaacttagaataaggaaatgatggtgttcagagtgaccttgaatctggctttgggggggcaggtacactagtaaaatccaggcaggcatagtagcctgcacccttggttctggcagaagaaaaggcaggtggatctcagtgagtttgagaccagctggcctacacagtgagttctaggatggccagagctacatagtaagaccctgtctcaaaaataaatacaaacaaacggatagatagataaaacaacagaccaagagatgcagaaacagtaggctggttaatgttctgccaccttaagaggtctgacattgccagatactgatggtgcatgcctttaactccagcacccaggaggcaaaggcaggcgaatctcttcagtttgaatttgaggccagcctggtctacagactgagttccaggacaaccaatgctacaaagagaaaccctgtctcaaaaacaaaaacaacaacaacaaaagaggtctggcatgtcttgatggctggacaaacttagcaattggacagttagtttctgtcccttcctcacacagttagatgataactgcagctccatttgctacccctccctaacacatacatacacacacacacacacacacacacatttaatttcactcctctttttcaggtatgtcaaacccagaggtgattcgggcactagagcatgggtaccgtatgcctcgaccagataactgtccagaagagctctacaatatcatgatccgctgctggaagaaccgcccggaggaacggcccacctttgaatacatccagagtgtgctggatgacttctacacggccactgagagccagtatcagcagcagccttgacggcaggaaggacatgagcagagccagaagccccatcagtgccttgacacgcccaacttgctgggcccactctcagacaccacaccacacacactgcagctgttgagtgggtgggaggacttcacaatctctttctgactctagtcatctgcaatccgccactctcagggcctccaagttggtatgtctcatttgcctggaatgaatgaattcaatctatagctgtgatttaagtggaaactgttagaatagtatttaaataaaagatatgaatgtcaaaggctttccc

SEQ ID NO: 473 - DNA, 2727 bp, Mus Musculus
tctcgagattaaaaccctttcagaaaatttgattacaaatctagagaatttgtaggggttaggactgggaacagaatagaaagtgagattgaaaatctttccccaggaggaggcagatggttttgcaggtaaagacgcctggtgccaagcgtggctgcttgagttcagtccccggaactcggaaggtggaaggtaagatcctagtcctccaaattgttctctaacctctacaccgctctgaggctccagggtacttacacacatacacggaaacaatcaaccagtcaaacaataaacgtaaaatattacaattctttagggaatccaagggtatttggtctcttaggtaggggtccaaaatctctggggatagggtttagaatcctttggacaggctcattacatcatggggggcttaaacgcactagtgggggagggggactgggaatcttgggagggcgggtcaaaccttggtgtctgagtaagtccttcaaggactggttagcgcccttgaggacagggttagcaaagaaatgctgaaattctttggaggtgaatttagagcaggagacaagagagccagagtgggagttaggctcttagagggcggagtcggggtatttgggggcggggtttgcatcacccagggtgcggctaaggcgcccagatggccagtgagcgccactgggttgcggctcccagcttgcactccccgcggcggctctcagacgggtgggaggggaccaaagtcgcccgtgaagggggctctgacccgttccgagcgccaacgcagcctctgtagcccgcaagtcttcgtcgcttgctccgggctctgaagtccggggccaccaggggccgcagcgctggggggtcggtctagctgcgaggatccgggctgcccacgaagcgaagggcgggcgcccaggatgggatgcgtgaagtccaggttcctccgagatggaagcaaggcctcaaaaacagagccaagtgccaatcagaagggccctgtgtatgtgccggatcccacgtcctccagcaagctgggaccaaacaacagcaacagcatgcccccagggtttgtggagggctctgaggataccattgtggtcgcactgtacgactatgaggctattcaccgtgaagacctcagcttccagaagggagaccagatggtggttctggaggaggctggggagtggtggaaggcaaggtccctggctaccaagaaggaaggctacatcccaagcaactatgtggctcgagttaactctttggagacggaggagtggttcttcaaggggatcagccggaaggatgcagagcgccacctcctggctccaggcaacatgctgggctccttcatgatccgggacagtgagaccaccaaagggagctactcgttgtctgttcgagactttgacccccagcacggagacaccgtgaagcactataagatccggacgctggacagtggaggcttctacatctctccaaggagcaccttcagcagcctgcaggaactcgtgctccactacaagaaggggaaggatgggctctgccagaagctgtcagtgccctgtgtgtctcccaaaccccagaagccatgggagaaagatgcttgggagattcctcgagaatccctccagatggagaagaaacttggagctgggcagtttggagaagtgtggatggccacctacaacaagcacaccaaagtggcggtgaagacaatgaagccagggagcatgtccgtggaggccttcctggctgaggccaacctgatgaagtcgctgcagcatgacaaactggtgaagctacacgctgtggtctctcaggagcccatctttattgtcacagaattcatggccaaaggaagcctgctggactttctcaagagtgaagaaggcagcaagcagccactgccaaaactcattgacttctcagcccagatctcagaaggcatggccttcattgagcagaggaactacatccaccgagacctgagggctgccaacatcttagtctctgcatcactggtgtgtaagattgctgactttggactggcacgaatcatcgaggacaatgagtacacagctcgggaaggagccaagttccccatcaagtggacagctcctgaagccatcaactttggttccttcaccatcaagtcagatgtctggtcctttggtatcctgctgatggaaattgtcacctatggccggatcccttacccaggtatgtcaaacccagaggtgattcgggcactagagcatgggtaccgtatgcctcgaccagataactgtccagaagagctctacaatatcatgatccgctgctggaagaaccgcccggaggaacggcccacctttgaatacatccagagtgtgctggatgacttctacacggccactgagagccagtatcagcagcagccttgacggcaggaaggacatgagcagagccagaagccccatcagtgccttgacacgcccaacttgctgggcccactctcagacaccacaccacacacactgcagctgttgagtgggtgggaggacttcacaatctctttctgactctagtcatctgcaatccgccactctcagggcctccaagttggtatgtctcatttgcctggaatgaatgaattcaatctatagctgtgatttaagtggaaactgttagaatagtatttaaataaaagatatgaatgtcaaaggctttccc

SEQ ID NO: 474 - protein, 503 aa, Mus Musculus
MGCVKSRFLRDGSKASKTEPSANQKGPVYVPDPTSSSKLGPNNSNSMPPGFVEGSEDTIVVALYDYEAIHREDLSFQKGDQMVVLEEAGEWWKARSLATKKEGYIPSNYVARVNSLETEEWFFKGISRKDAERHLLAPGNMLGSFMIRDSETTKGSYSLSVRDFDPQHGDTVKHYKIRTLDSGGFYISPRSTFSSLQELVLHYKKGKDGLCQKLSVPCVSPKPQKPWEKDAWEIPRESLQMEKKLGAGQFGEVWMATYNKHTKVAVKTMKPGSMSVEAFLAEANLMKSLQHDKLVKLHAVVSQEPIFIVTEFMAKGSLLDFLKSEEGSKQPLPKLIDFSAQISEGMAFIEQRNYIHRDLRAANILVSASLVCKIADFGLARIIEDNEYTAREGAKFPIKWTAPEAINFGSFTIKSDVWSFGILLMEIVTYGRIPYPGMSNPEVIRALEHGYRMPRPDNCPEELYNIMIRCWKNRPEERPTFEYIQSVLDDFYTATESQYQQQP

SEQ ID NO: 475 - DNA, 49617 bp, Homo Sapiens
ctggtcccagctcgggagcacatcagaggcttagaggcgagtgggaagggactcagacagtgcaggacgagaaacgcccgcggcaccaaagcccctcagagcgtcgcccccgcctctagttctagaaagtcagtttcccggcactggcaccccggaacctcaggggctgccgagctgggggggcgctcaagctgcgaggatccgggctgcccgcgagacgaggagcgggcgcccaggtgagtgccgcgcacaggggaccgggaatacccggcccgcgaggggtcccaggaggcggagggagcccaggagcctggggagggctggctacgggtgcggctgggggcagcgaggggagacggaacgtcgggggagccgcgggtagcccgggggatgaggggtcgacagcgagtggagggtgccctagggaggggcggcactgttgcggactgctggattcccggggaaggggacgctcgggcccgtgcagtgactttatccaccacttctctgggccgtccaggttccccttcttgggggggggcggggattttttttttaatttaaaaaagaaaaagaaggaagggatggggcttcacagaacccgggaaggggaaggcccttacggttcccggtgggggccgggtcacgccgggttggcagccagcttggggaagggggtagttgggcggaggcgtgacgtgcgagccacacccaggccggctgcagctggtcggctctctgcccctcctcccacaacaggtctaggtcaaacccccaaacctcctggccccagaccacactgcatgcatgccctgtctctttcctccttggacgaattctccgcctccgaattcgtttcctcatctgtaaaacggggctatgaagtctttcttgcaaggatgcaggaaattggagtatgcgagaggtggtgcgtgtgagagacaggctagtgggtagcggagggggcttctaggggcaaactgcctgttggggctggggtagaggatttggcctttctttgcctctgttttcacaactgcaggatggggagagtaatagtacctccttcacagggttgtttagaggattaattgggtactgaaggggccgggcagggtggcacacgcctgtaatctcagctttttgggaggccgaggcaggtggatctcttgaggtctagagtttgagaccagcctggccaacatggtgaaaccccgtctctactaaaagtacaaaaattagccgggcgtagtagcacacacctttaatcccagctactcgggaggctgaggcacgagaatcacttgaacctgggaggtggaggttgcggtgagccgagatcgcgccactgcactccagcctgggcgacagagagagactctgtctcaaaaaaaaaaaaaaaaaaaaaaaagttactgaaggaaagctttgagaatgctgtctgacagtacacaggcttaatgtatgttaacattgccctagctagacatatggccccgtgttctcagactttagcctacatcagcatcacctggactgcttgtgaaaacagattgctgggccgaatcctagagtttctgattcagtagctctgtgcaggacaatgagaacttccatccccggtgatgctgctgctgctgatccaaggaggacactttgagaaccactggggtagcctatgcctggcacagagaaaggcctcaatgcctatcagttgccttatcccatggttttctctttatggtccttttttttttaggggagggggtgacaggttaaaatacagaaaagtgaagataataatatattagatgtcccgagaatccaccatccagaattaacaaataatagcattttgttgtgtttgttttgagattttaaaaaattaatttactaaaagtaacagaaaaaattgaagtctccccaccttgtatcactctcagtcctgtttctctccctccccaggggcaaccgctgtcatgagttacagtccttccaggatgtgcctctgaaaatggattgcatataaatgtacgcataaacaacacgtaggattgttttgtgtgctttaaaaatgctatctatgcagtggttcatgcctgtaatcccagctactcgggaggctgaggcaggagaatcgcttgaacccggggaagcagaagtcgcagtgagccgagatcgcgccattgcactccagcctggacaacaaaagcgaaactccacctaaaaaaaaaaaaaaaaaaaaaaaaaaaaaaaaaaaaaaaaaaaaaaaaagcccggacgcggtggctcacgcctgtaatcccagcactttgggaggctgagccgggcggatcacgaggtcaggagatcgagaccatcctggctaacacggtgaaaccccgtctctactaaaaatacaaaaaattagccgggcatggtggcgggcgcctgtagtcccagctactggggaggctgaggcaggagaatggcgtgaaccctggaggtggagcttgcagtgagccgagatcgtgccactgcactctagcctgggccacagagcgagactccgtctcaaaacaaaacaaaacaaaaaactatctaattgtgagacttttctgcaattctgacaatggggatagcagaggagcatatttgccccatcttatcattaagttgtcaaaatctacccaggatgagaaatagaaaatagaggcctcattcattccttccagctgctgtggagtatcccagcaggtaacgactctacagtatttctctttcccctgtggataaatactcaagttgttcctaggcgttcactacaacgaacaatattgacaggagcatcctggatgtgtagctttcggcccatgtacaggtggttcttgaggaaaacaccaaaaggctggatggctccccagagagggcacctgtcacactcccctttgtgtgagaggagtactgtagcccagaagggtcaccagggactctggggcagagaagagagaagaatgttgctctgctgatctcccagccgtctctggatcaatggcctttctttcaggcctcatgttctctgctgtaaggcacttcacttgccttactcactatgcctggcacttaataagtgttcaagaaaatggaagcatgaaccttttgagggaacaataaccaatattttcatgtatctttatgtagtcttttctatgcacttttaaattaacataattagtataatgctacacatagattatttttatcctatttatttgcttagtattacattgtagcattttccaggtcattaaaatgttcttaaatttttagtggctgcataatattccactgtttgcctgtattataatttgcttaacctttctagcagagcaatcttttatatagttcaaaatttttagaaatattttaatcgaggtgaaattcacataactttataaaattaactatatgatttttaaagcgaacaattcagtggtatttggtatattcacaatgttgtacaaacactacctgtcagtagctcctaaacatttccatcacccctgaaaaaggaaactttgtacccattaagcaattaccccccattcccccggcccctggcaaccaccaatctgctttttgcctctacggactaatttattcaggatatttaacataaatagaagcatactatgtgactttctgtgtctagcttcttccacttaacataatgttttccaaggttcatccacatggtggcaactattagtactttattccctttgtggccaaataatattccattgtatggatattccacagtttatttacccatttatccacagatggaaattcaggttgtttccacattttgaccattgaaaataatactgctatgagcatgcatgtgcatacatgtatttgtttgagcacctgttttcaattcctttgggtatatacctgaagtagagttactgggtcatataaaagttctatctctgtggccgggtgcggtggctcacgcctgtaatcccagcactctgggaggctgaggcgggcggatcacgaggtcaggagatggagatcatcccggttaacacggtgaaacctcgtctctactaaaaaaatacaaaaaaattagccgggcattgtggtgggcgcctgtagtcccagctactcgggaggctgaggcaggagaatggcatgaacccgggaggcggagcttgcagtgagccgagatcgagccactgcactctagcctgggcgacagagcgagactccttctcagaaaaaaaaaaaacagtagttctatctttaactttttgaggaactgctatgctgttttccaccattttacattcccaccgtaatatacaagggtttcaattggcttcacatccttgccaatgcctactatgtttatattttattagtattattattaccattctaatgggtacagaaagcacgaatcttaatctcattcaaaccaggctgccctctgagggctcttacctcagaaagtaaggagaaagttgtctacattctaaggactagccagggcttggactttaaactcttctagaaagtaaattctacaagagcacaaacatgtttgtcctataaaccactgtatcttctaacacctggcacctggcacatagtagggcctcaaaaaaacactgatgggacaaacgcaatgaatgttggacaacctcctccctcccttgcctgagatatttcagctgccctccccgaacacccctccacccgcagcgattatttttaattagttgctaacatttaaactcaggagagctcacataatctggatttctgtctcctaaaacattagaagagttagcagccctgagactagaacccacgactccagtgctcttcagacaacctcagtggagctgggggctgccctgggggctacacctgggctgtccagcttgcacagcccttgccaggcccactttcctcatccgcagaaccctccacatccctatagtcatttgagttttcaaaccccacccttcgggtcatgacaaggcttccttttttatagaaaaggaacatgaagggctgggtgcggtggctcaccctgtaatcccagcactttgggaggccgagacaggcagatcatctgagctcaggagttcgagaccagcctgggtaacatggcaaaaccctgtctctacaaaaagtacaaaaattagctgggtgtggtggcacatggctgtagtaccagctactcaggaggctgaggtgggaggatcgtctgagcacagaaggtgaaggttgcagtgatctgagactgcaccactgtactccagcctgggtgacagagcaagaccctgtctcataaaaagaaaagaaaaggaatgtgaagcctagagagggtaattgactttcccaaagtcacacagcaagttagtagcacaatctctctcagcctctttctttcttacatctttttgttgttgtttatttttctttttttataccacaagtcatcaagcaatcacttctgcctttctaaacaaaccccaccacatgcaccaaccacatgttggtccccaccccatttctccagtttcctcccccacaggactgggagtttgaaggtactttcagaggcgtgggtaatgatgcagaagcagcctgtgcttaagtgtaaatgtgccctggtcttggccccggctgtggtcccacatgctgcatcctctggatggcactgcgctaggacgtgcgctcctgactctcccttcgagtcacctccctgagttccaggcatcaccctgaaatcctttggcccaggagatgtaagtgcagccaagagaacaggaatcccagcctcatctctaccatagaaatgaagaacagtgggtacagtacagtagacgaccccgagtctgagtgccagctctgccaaagacaggttgtgatgcactaggcaaatctcttccctttctgagcctcagttcccaaatccaaaaaaaaatggaactgaggctgggcacggtggctcacacctgtaatcccagcactttgggaggacaaagcaggtggatcacctgaggtcaggagttcaagaccagcctggccaacatggtgaaaccccgtctctactaaaaatgcaaaaattagccgggcgtggtggcgggcgcctgtaatttcagctacttgggaagccgaggcaggagaattgctggaacccgggaggcacggttgcagtgagccaaggtcttgccactgcactccagcctgggctgacaacagcaagactctgtcaaaaaaaaaaaaaaaagggggagaactgaggaggatactactcatgattcctgcagcacaattccttttatgtcaaaacacacacacacacacacacacacacacacacacacacacatacacacactagtccatcatggcgtatatgtcttagtttgagtttctccagaagcagaccctaggcaaggtttcaaatgcaaatagtttgagagctgattccagagaccctcctaggggagtaaggaagtgaggcagggaacaggaggtagtcattaaaggtgtcttctaagcccagttaccactgcgggcacctggagctcaatcccactgaggagctctgggagccagggtagaacaggcttgagaggtgagggaaccggggtatttgtccaccctgttctcgctcctgtcttttgttgaaaactactcctggggatgtgataattctctagcactttcggcttgccaagcccatgggcagagcaggcaccaatagccacagagaaatctctcagacaaagagatgaaggtgccggcagctggaagtccagccagaatgtgcagaaatggtaaagggcagagtgatagaggcagggcactgacagcctctgcttcaacatacatgtgtgtaaatgcagaggcagaggctgaggccaaatgctggcagaggatatctgggtggggaaagaggtggccatggagggcttatagaatgagtaatccaagagtgtcttaaatgtatctgtaatgttttaatcttccttccttccttccttccttccttccttccctccctccctcctttcttttcttttctttcttctttcccttctttccttccccccttctcctcctcctcttcctcctcctccactttcttcttctcttccttcctttcttctttctctctctctctttctttctttcttttttctttctttctttctttcttctttcccttcctcctcctcctccttcttcttctttcttgcttctctctctctctctctttctttctttttctttttgagacagggtctcgctctgtctcccaggctggagtgcagtgatgctatcatggctcatgcagccccaacctcctgcgctcaagcgatcctcccacctcagcctcctgagtagctgggatcacaggcacatgccaccacacccagctaataaaaaaaaattctggtagaaatggggtcttgccatgttgcccaggctggtcttaaattcctcggctcaaacgatcctcctgtcttgacctctcaaagtgctggtattacagatgtgagccaccatacctggcctctaatggtttaatttttaacaagaaggatgcactaatgttttactaggtggtaaaaggtcattttaaaaataaaatacatacccttcaaaaaataaaagaaactgagacctggagctttgtcaattataaaaaaaatgtaaaaggatcagcgcctgtgttactgaggctttgaggattccatttgtggaggacaggtttgggggcagctgatctctcagtaccacggcaggttaaagtgaaaagtggccctggtggtgaactggccaccatgtcctgtctggagggggaaacttccactcagcggcagccaaggaaagactgctcctctcccagcagaagcgagcaaatgtgcatcacccttctcagtttaaacatatatttatagctattggttttctttttgtttgtttgtttttgttttgagacaggatctcactctgttgcccaggctggagtgcagtggggcaatcttggctcactgcaacctctgcctcttgagttcaagcaattctcctgccttagcctcccaagtagctgggattacaggcacccactaccacgcccagctaatttttgtatttttggttgagacagggtttcaccatgttggccaggcttgtctcaaactcctgacatcaggtgatccgcctgctgacctcaggtgatccgcctgcctcagcttcccaaagtgctgggattgcaggcatgagccattgcacctggcctatttatagctattgtttagacgggaaatctgggggcatccagcagactaaatggggaccttactgtcatatctcatatcctattggtcagatggataataaacaaatcaacaggtaatacattaggtgcattagtccaggtccttttttattttttcttttctttttcatacttaacttcagcataccctgagatagttcaagtcctttgagaagcagactcccatagcatcaaatgtgcaagaaatttattggaggaaatggctatgagagaaaatgggaagaaaccaggagaggacaggagagccatcagatagtggggtacctctgtccactaatgaaaaagaaaaggaaggaagaaaggaaggaagaagaaaggaataaaaggaggacgtgtcttggactgccatgccgtattttttttttgtagttgttgttctgttttattttgttttttttgagacagagtcttgctctgttgcccaggctggagtgcagtggcgcagtcttggctcactgcaacctccgcctcccgggttcaagcaattctccttcctcagcctcctgagtagctaggattacaagcatgcgccaccacgcccagctaatttttgtatttttagtagagacggggtttcaccatgttggccaggctggtcttgaactcctgaccttgtgattcgcccgccttggcctcccaaagtgctgggattacaggcgtgagccactgcgcccagctgccgtgccattctaaggaaagtttgtcaaggctgttaaggagcccttggccaaagtctcttgacagaggtcccccagacatgggtgggcttcggtctccctgccacactcagtcattggctgggagcagcccatgagagcagtgatggacttcagagcacagcagctgagccgctgatcaatttctccagtcgtactcctgcagttggagatctgagaggtgcatcctcatggccaccacgtttaagaggtggttaggggcatgaagactagctgggaacaggctagacagtgatgggagttggggggcagaggatcctgtctttgccagggtgatgagggaaggttgctctgagaaggtacaatcattagagagactgaaggaagtgatggagcctttctgggtgaagaatattccagaaacagaacatgcaatgccccagaggtataagcacagttggtgagttgaagaagagcaaggagggctccagtggaatgatcaagggagagttagaaggagacagatctgagaggctgaggaggggatcagattgtggaggtcttacccaccttggagaggacttgggcttttactccaagtgagacggaaaccctgggtgggggttgagcagagaaggaatgcgatctgacttacctttttttttttttttttttttgagacggactctcactctgttgcccaggctggactgcagtggtgcgacctcggctccctgcaacctctgactccggggttcaagcgattctcctgcctcagcctcctaagtagctgggattacaggcatgcgccaccatgcccgcctaatttttgtatttttagtagagatggggtttcaccatgttggtcaggctggtctccaactcctgacctcaggtgatctgcccgcttcagcctcccaaagtgctgggattacaggtgtgagccaccatgcccaggatgacttacatttttaaaggctcacttatttgtaagaggcagaatgcagattcaaacccagctctatctgacttcaaatctcatgctctattttcaaactgccctgcctcctgcctgccttagagataaaatcattccaagaaggttcacagttgctctggaattctgaaattgaccaagtgtcccaagagtaacattgaacatgctatgagttttatatgtggttgaataagtgtttggaacacaggcatctcagagccaaccctatggctcagccaggcaaatgatcaaagccctgagttctcctttagtgtgttgctctgtcgctcgccatcgtgtgagccagggcccacgcagcctcttggggttgttactccacctgtccaatgaagattttgatctcccaagtttcctcctgtttgcaaaatcaaagttttgagctctatgagaaagaagctgaggctcagtaaagggaagacgtgagaagtcaggagtgacccctaactgtctattagggacagtagtcactcggggataaagacagttcattcagaagacagtcagggaacccgaggagagggagctgctgggctctgcacccccaaggcactgctcagggaattggctcctgttgaggaaatactttttccccacccccattgctgagctgttctgagaagggaaagttcctgtaactgaacagccttaagccctgggcccccagcggtctgccttcttgagagttctgtttgggttcctcattctccccttccccttcatcgcccacagcctctggggctgacctcagtggatgatgacaggcaggagagctgagtgccagtttgacctaccactgactagccgggggacccactctcccatgggcttccatttccctatctgaaaaataacttcataattctggtctgttgacttcagccaagtatgatgaggtccatagagagtagaacataatatatccattacacgaatgtgtatggggggcctattagataccaggtgcttctttttttgaaacattcttgctctgtaacccaggctggagtgcagtggcatgactacaactcattgtagcctcaacctcccaggctcaagtgatcctcccacctcagcctcccaagtagctgggaatacaggcacatgccgccatgcctggctaatttttttgggtagagacagggtctcgatatgttgtcaggaccagccttgtactcctgggctcaaagcaatcctcccacctcagcctccaaaagtgctgggattacaggcatgagcccctgcacccagtctctataaccaggtccttttaaggcatggcttcagtgccatcagcttaatgaggtccatattcctcccatcctcacctactctaataggtctagtaccatcttaccttctcttctaccaaaacctggtatcagggaggtctttgccatcagccatttgcacttgagtgcaaatcacaatcccttataagaattccctctgcactgggcaagactctttgatgtttaaagggaaataaatccaactcaaaactggctcaagcagaagaaggaggttactggaaaatccctgagatatcagcttcaggcgaggcttaatccaaggctgagagtctgcatttctctatttcttgggtttgccttgctgctgcaggcctttttttccagctagaaaccaagggctggctctcgttggccagaattgaatcacatgcccatctctacttcttttttttttttttttttttttttttgagatagagtctctctctgtcacccaggctggagtgcaatggcgcaatctcggctcactgcaacctccacctcccaggttcaagcaattctccagcctcagcctcccaagtagctgggattacagatgcctgccaccaagcccggctaattttttgtatttttaatagagatggggtttcaccatgttggacaaactcctgacctctggtgatccacctgcctctgcctcccaaagtgctgggattacaggcatgagccaccgcgcccatccacccatctctgcttctattactgcaactctcattggcttgatttggtcacagatccacctctacagccaggggttggagtcaactctatcccaatccataaactgagactaggggcggagtaattcccaaaggaaaattggagaactgttgttagaagaaggggggaatggattctatgcaggaaagagctgcagcttcttctttcagagaacttctaatccaacatctcatttcacatttggagaaactgaggctcagagacaagttgagacttgcctaacatcacacaatgagcttatagcagagatgggaccacaatccagggcttcacaccctcagcccttgcaggtttctgcttaagcatagaagctcccagaaaaccatctccagcccactggatggatgctcaggcaggccccggcctctcccccttgagcttgactctgagagcacaggccgagtctctgagttttccacagccagcatggtaaccctgggaagcagccaggcacaagcaagctgacctctctcatttcactcagcagaggctgaggcggtgaggagcaggtttcaggttcccagggacggcagtggcccgaggaagtatctttaccagggatcagcagttttgagtgggtgtgcaaccaggcagactgcttctgctctcagagcgtgcttttgaagcacattagatgagaaatgcgtatgcagaagttttatacagtccttcacatccctagtcacataggacctcaggccaagcctgagaagcaaggcctcctatttagcaggaaagaaaaataaggctcagagagggcaaatgacttgctcaaggtcacatacccagtcagtggcagaactgctatccaaactcaagtattctgactcccaagttcagccttcattctgctacattggtggatctcaaattttagtgtatatactaatttcctgtagaattgttagaactacagattccaggacctcactcccagatactggttcattcaatccagagtgtgacccaagaatatgcaagaatcagtggagactttttgagttcaaatggcagaaacccaactcaaattggcttaagcaaaattgataatttatttgctcgtggactggaaaaatcctgaggtgtataggcctcaggcatagctggatccaggtgctcaatttatcttcaggaattactttatctccatacctcagctctgttgtcctctctggtggcttcactctaaagcagcttttaccttgatgatgttgaggtggcctccaagaactccaggttcctacatctcaacaatccttatagaaagagggtgctttttccctaatttttgcagcaaaatcccagggcagactgcctcagtgaggaggacgtatatgcctacaactgaaccaatctctgtagccagggggccagaggatatgggattctctgattggccaggcctgtgtcaagttgccaattcctgaaggcaagggtgggatcggccccaccaaacttcatgcactaagtgggagaaagctggttctccaaaggaaaatccaggtactgttatctgaagagggacagatgctgaggaggcaggagcaaaagaggttctctagccttcttggctagaatgttcacatgaatcgcctgggaaccttgttaaaatgcacattctgatttgggaagtggggactgagattctgcatttcttacagctcccctgtgaggttgaggctgctggttctcacgctagccacactctgagcaccatattgcatttctaaactcactcaaaccactttgtcacaaggcactctgcagagaggccctgggctacataaacctctttcttccaccattctctccccaccttcaccccatcccctgttcccaaactcacccgaataatatcagcaccatctgtttgggaaccactcaccaacatactatagattctgctgacaaatcacagttgaagaaattgtccattgtgccctccagtgacttttttttttttttttttttttttttttttttgagacagagtcttgctctgtttcccaggctggagtgcagtggcacgatcttggctcactgcaacctctgcttcccgggttcaagcgattctcctacctcagcctcccaagtagctgggattacaggtgtgcgccgccacacctggctaattttttctgttttcggtagagtcagggtttcatcatattggccaggcttgtctcgaactcctgacctcaagtgatccacccacatcagcctcctaaagtgctaggattacaggcatgagccactgcacccagccccagtgacctttttatgaggagccacagaacaaattctcttttgaatttatactcaaaaaatatttgtttctgtcaacagacaatttgttgtgcttcctgggatcttatggtgatgttgtacaagtttccatttttatcttggctactaggaagctcagagataaatctagtactcaatggtagtagcagtcccaccctgggcttctggttcaataatctttcccttctatatggtgtagagtaaccctttttgagtcttgcagtgctctgtgtatggtttaatattataagctccttcaaatcctttttggaagtcggttcttctttggagtattcttgactttcccccaatctttatctattcagatcctccctgttcttcaaaacccaactcattatcttgctgctcaattattattgtaaacaggttgctttttatacgaacttactaacatacacgtaggcacataaattcattttagaagagtggtttgatgtacatgtttgcagtttgcatttttcacccaataagtattttagcaatctttgcatggcccctcctatgtttaccactccctagtagcttatttttctttcattcttaaaactgtggtaaaatatgcataacaaattttccatcctaatcatttgcaagtgtacacttcagtggtattcaatccattcagcatgttgtgcaaccctcaccaccatccatctccataactcatttcatctgaaactctacacccattgaacaccactaactcctcacttccccttcccccagcccctggcaaccaccattctactttttgtatctcctaatagcttcttagtatgtggcttcggaatgtaattgtgtgtccagtctccccttctcaactcggtcatagagcaggaatgtcctgatgcttttacttttttttttttttttttttttgccccgtcttatggtgctcagacacttttacttcctactacataaagtatggcacgccaggcatgcagccattcactcactgtgcatgacactcctactgtgtgccaggagacactgggctaagcactgaggaacgcaggtgtgagcaccagcctttcctgtgctgcagtgatgggagcattctgtctctgcatgtttgcatatggtggctctgagccacagacggctgttgagcacagatggagtcatagctgagatgtgctctaacagtaaaatccacactgagatgtgaaggcttagtacaaaaaaaaatgtaaagtatctcattcataatttttatatttattatatgttaataattttgatatattgggtaaaataaatacatcttaaaattaattcacttgtttctttttactttaagaaacctggatgtaaaaatttttttaaaaatgaaaaataggccaggcgcagtggctcacacctgaaatcccagtactttgggaggccaaggaggacggatcacctgaggttgggagttcaagaccagcctgaccaacgtggtgaaaccctgtctctactaaaaaatacaaaaattagccaggcgtagtggcacatgcctgtaatcccagctactcaggaggctgagacaggagaatcacttgaaccctggaggcagaggttgcggtgagtggagatggcaccaccgtactccagcctgggcaacaagagcaaaactccatctcaaaaaaataaataagtaaatgaaaattaaaaaaaaataaaaactaaaaataaatttaaaaggaaaataaaaataaagtaaaatgaaaataatttttttttaaaaaaggaaaaaataaaataaaataaaatttcaattttaatttttaaaaacctggctgtagaaaactttaacttatatttgtggctcacatgacatttctgggcctagtgaccatgaacatggacatttctgatgcccagtccacaccaggcagcagacatggttctctcatttagggagacaatcacattttacacaaatttgactcctgccagtgtatcactttcagaaaaatcacactttcagctgggcatggtggctcatatcccagcactttgggaggccaaggtagcaggatcacttgaggtcaggagttcaagaccagcctgagcaacattgtgagacctgccccccctctctgccccctgtctctacagaatataaattttaaaagattagccaggcatggtagtttgtaactgtagtcccagctactaaggaggctgaggtgggaggatcacttgatcctgggaggtcgaggttgcagtaagctatgattacaccactgcactccagcctgggtgacagagcgagactgtctctgagaaaacaaatcacactttattgtgcaaaaatggaactcatgggaattccctattttaaaaaaagcgaacttctccagtgttgcagtatctctaggcttgtgggccagaggaattgcaaactgtgcttgcttcatgatccggggcagtgtcacgtctgccagtaaacagaaatagttgtggttaatgtttctgcagcgcttactgcatgctgggcacttttacactcatcaacttgctcagtgctcaccaccaccctatgaggtagaacccttgccaccctttctcagagatggccttggattgtgaatgaacacaggtcttctgagacccctccctcgggaccctgtggccatcttgaatatgtacattgatcacgtaagtgaagcatacaaggtgctcaacgcgcatggattggaaatcacaagactcacagctgcagatcagtgggtgcccagagaggtagagtgagctgccctacctcacacagtgctgctcttcccagaacatctttatgctgaccaaaacacacgaaatgtgatataattttatgtcatatatgtcacacaagatgcccgtttaatttcccagaactgtaatacacatttatctcaaagagagatgctggtttcagttttaaatgcatgcaagtacattataaatctgtgcttaattatgataatttttcaaattaatgatccagcactccaagagtctgaatgtgttccttattttatttccaaaagacaaacaaagcaaaaccgctcaagtcttgaggtggcaaatctttcccagttcccaccagaagaggtaaatccttgtaaataaaaggaatcttttttcatttttaaaagtaactcatctaagcctaggagtttggggtttttttccttaaaccacaaatacatgtttattttaacaagataagtataactgagttctaactgctttagaagaaaatggcaattgtgcagagatgagaaaagcaagcacttccttatgtggttgtcacagcctgccttctcagcaaatgtgtgtgcacattttgagaaaagaaatgaaacatttcttccacttttacaattatgttttgactctacttggagtaaatgtgttttgtttaagcatccttaaattaattcaatacagcagcaaagtctgcaagctctacctccaaaatgtcccccaaacctgtccaatgcttacctcctctctgcccccacactaccctgggccaccatcatctcatacctgaacaattttggcagatttctcacagggttccctcccctgctccccactgtccacgcctcactcagccaccggtgggattatttaaagtgcaaattgaatcccatcattctcctgccagaaactttccatcatccttagaataaaatccaaagtccttactggccctacaggatatggtggccttgtcacaaccaccctcttccctgcccatgagcttcagctacactctcctgctttcagtgcctccaacttctctctaagcacatgccagcctcagggcctttgcatttgctgttccctctgcctggaacactcttccctcagagtgtcccctcactggctcctttgtgtcatttagaccgcaggttctgtatccctttctctgacaggccttccccaaatgccctgcctaaaagagccagacctgttgttccccacagcatcctctcttattgtcctcacacttttcattaactcaatttgccctgttatttatttgttggcctgtttattgtctctgtctcccattcggctgcagttgaggtcctgagggcgtgaacttgcttctcttcttcacagtttagaaaagtgcccagtaaatcttggctgtgtaaatggatgaatgaattaccaaacaactcagagagagacagagagaaagagaggaggaagaggaagaggaagaagacgaagaaagaggaggaggagggaggacagaggagggggaaggaggaggaggggaaggaggaggagggggaaggaagaggagggggagcaggaaggaagggagggagggagggagggaaggagttataagcaatttataaattgataccagtaatacggtgccttgacaaactagattgtttgagccatgttatgtgacctcatcttgttatttaatataaaaatggcaatttatcatctgataatactgcagtttttctgtagtgtttgctctgagcctgacactgcactgagtatttccccactgtaggtcatattattgtccccattttgccgatgaagacctgagaggtgggtaggggcaggaaagtggtcagtgaggtgctggtggggtggaggggccaaggatcagctgaggctttctgacctgagagctggcagtgcccacccaacagctctacctgttacatttctgttatcctcatgccatcctctgaataaacatccatcacgctggtccttggtacccacgacaatgacagcttgtcagccctgggccagtgctgtggcacgtggacatggggaagcccagaggtggcaaggatggagtgggttccatgtggggaggataagggtgcatggagctggcaggggagttaagaccgggaaggccagtgggagccagcccgggggcaggggacctggaatgccagcatcagaagacttccccgcatgaggctcttggtaactggggctcacctcccttctgtctgctgcaggatggggtgcatgaagtccaagttcctccaggtcggaggcaatacattctcaaaaactgaaaccagcgccagcccacactgtcctgtgtacgtgccggatcccacatccaccatcaagccggtgagtaggggaggtcccagtttccctgggggctgacggatgctgccccaacattgccctaacagcctcctgtcttcccaaggttgggcagggtgagcttggggtgaaagggagctgactggccaccaacagtgtcctgactcgactctccgggacgcagcgccagccagcatgcataggggcaaagaagtcatctctctttcctgcagcccaggcttggcccctcagcctgagctccaccaaacaggtgtgagtgagcatctcaggcctccggcctgggcagaagcaaaagcagtgctgagaaacgagtgaacagtaatgatagcagctgaagtgacaatgtaatggtagtatcagcagcattgcaaaaatacagtaacaattgtcatactaatagtaccaaccataattgcgtgagtataagaccaagagtagcagcaggaacaacagcaagagttgtaaaaagagaagcagtcatgctaggagaggtatttaccaacttcttttatgtttatacaaagctgactatgaacccagcactgttgtaagcctttacggttattaacaccctaatcctcacaataatcctattgtgtgacacacaaatacattcttcttgaaaataaaaacacaggccaggtgcagtggctcacacttgtactcccagcattttgggaggctgaggcaggaggattacttgagcccaggagttcgaactgcatgagctatgatcacgccactgcactccagcctgggcaatacagggagaccctgtctctttaaaaaaaaaaaaaaaaaaaaaaaaaaagagctgcttagaatgccatagtttaggtgtcacttcccccttgcatggacacttagattgtttcacatacataacagagcctttatttatggaatataaatcactggtgggcctgtgatttctccaaacttagtcggaaaacactgatctggaccgaccccttcactgtgtgttgaggggaggggtcaagcagcatcccccggtacatccaagaccgaaggccgaggccacagctcaagaaacctggatcctggctgggcacagtggctcactcctgtaatcccagcactttgggaggtcaggagttctagaccagccgggccaacatggtgaaaccccatctctactaaaaatacaaaattagccaggcatggtggcatgcgcctgtaatcccagctacttgggaggctgaggcaggagaatcacttgaacccgagaggtggaggtttcggtgagctgagatcacgccactgcactccagcctgggtgacagagtgagattccatctcaaacaacagcaacaacaaaaaatctggaccattttgtttgctggctctgcccctaatgtgccgtgtggtgccaggcatgtcccctgccgtatgtgggcctcctcccacgacatgcagggctagggtaagatgctcttgggtgtccttctcaacacagaccttccacgggtccccacacattggtcagattcattctcttctctcatttcttccccacaggggcctaatagccacaacagcaacacaccaggaatcagggagggtaagtatctacgagcagatgcagtggagtcatgtgtcctgcagaggactccgctaggttctcccttagcttgaggcataaatcccaaacagtcaaacccctgtcgagaatccccaaaatttcctctgaagtactttgcgcaggctattgtgtttctagaacgctgtttagtaacatgaacaaaacatatttagctttaaacttgagaatcacacccagcatggtgagacgcctacttatacttggaaccacatatcgatgggtgcggagctgttccaggtgccgggtgagggtcaccaagggctgtggatgcacttagacgaaacctcaccctctgtgtgtctcccttcccagcaggctctgaggacatcatcgtggttgccctgtatgattacgaggccattcaccacgaagacctcagcttccagaagggggaccagatggtggtcctagaggagtgagtccccatcccactccccctaagacagacctgcctcctctactcaactatgtgctcttttgtgcttccataaagaacctgatagatgggctatcttatcctgggtataaatgtctaatgagaagctaatcacaatagtggaggaagggtttgctgtcaacctggatgaaggggattgtgcacttactgagagtgcacgtccagcctgagatgaacaggtgacgctttctcagggaagcctttctagggctcctgcgattaagccaccggctttacctgtggaccaggccccatcgagtcgaccttgcatttggaaatccttggatctctgagtttgccacctcggatctcctacagccttcaccatcatgggtatagtgtccaggatgtgctgaagcccgagaacgggagtggtcatgcctggtcggactcccaagcccactctcccctattctcagccccagctgaaccattctgagtctctataggcacaggaccctgccatgggtatagctaataagaccaaagctgcaagtccagggaaaaggagtggagccagagacccagggctctgggctgtggacagggagattccagaccctcagatgcacagcaggaactggtgtaaggatccctaccctaatcatgggcacatgctggggctgacatagtcacagccctgtccttcaccctactggctttctggaggcagggagttttctaggtcaaggctggggagcttgaggagactggagaatgatccttctgtccctaacacctttactccctcatgtccctcagatccggggagtggtggaaggctcgatccctggccacccggaaggagggctacatcccaagcaactatgtcgcccgcgttgactctctggagacagaggagtaagtatcctatttcctaccttccagaaagaggcatgagcaaagccagccttgtttgcaactcaggacgtctgcacacactgtaccactgcctggcacatactcttcccagggctctgggcttggctggctccttctcttccttcaggtttcatccttccagtcagggaagagaggctaaagtgggtcccagctgtgactctgtcttgtggaaacctgttttaatcccttctgaacatgttttactagcaaaacgacctggtttctttggttggttacaagtgcattctctgcctgccctgcaaggaagagggctggtgagagcggggactttgtctgcttctgcatcctcggcacaggctggcatgcagtcagtgctcaataaatattgttgaatgaagcacacggtcttgccaaggagggtttctggagaggtgagacagctcacacctggccagtcgtccctcatttgttgttttgttttgttttgagacagggtctcactctgttgcccaggctggaatgcagtagcaccatcacagctcacttcagcctcagcctccctgggctcagttgatcctcccacctcagcctcccaagtagctgggactacaagtgcgcatcaccatgcccagctaatttttttcttttttgtatttttggtagagagggggtctctctgtgttgcccaggctggtctcaaactcctgggctcaagtgatcttctcgcctcagcctcccaaaatgctgggattataggcctgaaccactgcacctggcccatccctcatttgattcattcgacaagcacatgctcatgactcttcaagccctgtgccagcctaaggggctgtggaaacaaataagatatatccctaccctcaaggagctctccataacccatcgttcttggctgtgggttcttcttgtgtctagcttgactctaaaaatatacttcagtcatccatccatccatccatccattcatccatccatccatccatccatccatccatccatcatccaacagatacctgttgattccctattccagggttagaagatgacttagatggggctccctgctggagatgttctctgtatggtggatgaggttgatgagtaaaaagatgactacattgtggggtggcaatacatcccattaaaaaccagccaatcaaaagttgacaaatgacagtccccattgttttgtctcttctgcctcctctttctagctagatggtattatgggtttgggatgcttgcctgttaaaaatgaaaacgcttaggcttttcccattataaagccacctccttctggctgggcatggtggctcacacctgtaatcccagcacttcgggaggccaaggcacgcagatcacctgaggtcaggagttcgagaccagcctgaccaacaaggtgtaaccccatctctactaaaaatacaaaaaaaattagctgggtgtggtggtgcgtgcctgtagtcccagctactcgggaggctgaggcaggagaatcacttgactccagggggcagaggttgcagtgagctgaaatatcatgccactgcactccagcctgggggacaagagcgatactctgtcaaaaaaaaacaattatgtcaccccttcttagtgatcatggaactgggggctcttagctgtttctctctccttcttccaggctttgccctgggtcatcccatgctctgtttctccactccagggtctgaacacttacagaatccctgggtcacctcatgtagtccttgcagcaaccatggaggaggcgtggctggcattatttctcaaaggcaacataattgctaagtggaaaacgcagggtgtagacaacatgaatggggggttatcatttgcagacaaaggcaaaataacctagatggggggttctcagacatgagcagcaacagcatcacctggattgccggctaacaagtgctttctgggctccactgtcagattccgaatgtgcatttctaacaggttcttgggtgaggcagctgctgctgctgctgctccagggacccagcttgggaaccactgatctaaatacgcatatctggccaggtgtggtggctcacacctgtaatcccagcactttgggaagccgagggaggtggaacacttgaggtcaggagttcaagaccagcctggcctacatggtgataccctgcctctactaaaaatacaaaaattagccaggtgtgatggcgggctcctgtaatcccagctactcagaggctgaggcacgagatttgcttgatctgggaggcagaggttgcagtgagccgagatcacgccactgcactccagcctggacaacagagcgagactctatctcaaaaaataataataaaaataacaaatgaatacacatatgtgtcctttcagggcactcaggggtccttgtgtctgaatcaagaaactgctaacagaggttgcctctggggagcacaactgggaccttgggaatcagggcgggatggaatcttggtttctctcattctcccttgaaataggcaatactttcaaatgtttcaaaatgcaaatgtggggaagcatgcagaagagtgaaaagtcttcttcccaccctgtccccaaccagccacttcccctccccagaagcaaccagtttctcgtgagtcctcccagatgcttcctccttatataagaaaagacatctcttcccgcttatctcacacaagtggtagataccacacacactgttccatgcctctcgttcagaccttccatgcagcaccttgttcctgttttgttttgttttgttttgttttgttttttaggtggagtttctctcttgttgcccaggctggagtgcaatggtgtgatctcggctcactgcaacctccgcctcccgggttcaagcgattctcctgcctcagcctcccaagtagctgggattacaggcatgcgccaccatacctagctaattttgtatttttaatagagacagggtttctccatgttggtcaggctggtctcgaactcctgaactcgtgatcctcctgccttggcctcccaaagtgctgggattacaggcgtgagccactgctcccggacacctccttcctttttataccacagggcgtctgtcctgtagatgtcctaccgtccatttaacctctgccctatacagtggtcacttaagttgtttccagtcatgtactgaagcgaatctcctggtgtatatgtcatttctcccttgtgcaaggtctatgggataacttcctaggaccagaattgtcagggagacagttggttttttttgtttgtttgtttgtttgtttttgagacagagtctcgctctgttgcccaggctggagtgcagtggcgtgatctcggctcactgcaagctccacctcccaggttcacaccattctcctgcctcagcctcccgagtagctgggactacaggctcctgccaccatgctcggctaatttttttttttttttttgtatttttagtcgagacggggtttcaccatgttagccaggatggtctcgaactcctgacctcgtgatccacccgcctcggcctcccaaagtgctgggattacaggtgtgagccaccgcgcccagccgggggagacagttcttagtcttacatagttgaatattttaccatggcacaagtcactttacaacatgaaagcaaagaaggtagatgagcaacatagcatggtgattcagagcttgggttctggagttagactgcctagcttcaaatcctgcctctacaacttcccagctgtgtgactctaggcaagtcacttgccctctctgttcctcaatttcatcatccataaaatggggccaggagcagtggctcatacctgtaatcccatcactttgggaggccaaggtggatggatcacctgagttcaggagttcgagaccagcctggccaacatggtaaaaccccgtctctactaaaaatacaaaaattagctaggtgtagtggtgggtgcctgtaatcccagctgcttgggaggctgaggcaaaataattgcttgaacccgagaagcagaggtttcagtgagcccagatcacaccactgcactccagcctgggtgacagagcaagactcagtctcaaaaaaaaaaaaaaaaaaaaaaagggggggaatgataaaggtgacaactccatagagctgttgggtggatagcaagatagatgttaacttcctccccagttgataacagaggaaccaaaggcccaaagaggaaggcaacttgctcaaagtcacactgcaggtttgtggcagagccaaggcaggctgaggtcaggtctggggcttttttccaactgctcctcaccccagtgaaggtgggaatggattccactgctgctgcttgaacttttccacccaaatatctcaatattcaggaagaatgaagaaaatgtcccaggatataatcctaagtataaaattctttccaatctcacattgtagcttagaagttcaggccaactttatattcaactccatatatgcggaggaggattggttgtaaagctaacaaaactcaggcccttcacaggcttccaaggtcccaagaaggatcttccccgtggtcttgtatgcttgtgaaacctgcaaaagtaagactttgaccacagctggttaagactgctgtctgtttccactctgtcttcctgtccatctccctgtccctcacagcgagcagcactgaaatgacctatcagctttttgcacttgttaatgctgtattatttttcttaaaggaagttcccccactccaaattgcataggcttcagtctcagcaaacaggattcacttcgggtaaaatgtctattttgatatcaaaagaatggctcctttaccttctctcccccaaaaaatctttgagtaaaactgatgctgcaggaagccagaccctctgtatcctgacattcccctgggacctgcatggccacaggcatcctgtgtaggccggacaggactgcatgaccccaggttcacatttgtcccctcccttttccatcaggtggtttttcaagggcatcagccggaaggacgcagagcgccaactgctggctcccggcaacatgctgggctccttcatgatccgggatagcgagaccactaaaggtgacaccagccctccccaccttgtcctccctgccgaggtgccccagctggggctggccaccaccctttccttggaaaatgccctgggaaaggctgaaaaacccaaccaggtgctgtggctgccaggtttctcctgctcttggccacctgagctggggagggttgaggctctgtgcctggctctgcccttcttatccaccatagctgccagcttaggtcagtggaactagtgccaggtggcttaggccctgaaaacaaagaaacatccagctgaagcttgatcttcactgacttgttttttcatttgttttggttcttgttttgttttgttctgttttttgagatggagtctcactctgtcgccaggctggagtgcagtggtgcgatctcggctcactgcaacctccacctcccaggtttgagcgattctcctgcctcagccttccaagtagctgggattacaagtgctcgccaccatgcccagctaatttttgtatttttagtagagacagggtttcaccatgttggccagtatggtctcgatctcctgaccttgcgatccacccctcttgccctcccaaagtgctgagattacaggcgtgagccactgcgcctggcctgttttgttttgtttgagacagggtctcactctgttgcccaggctggtatgcagtggcacaatctcagctcactgcaacttctgcctcctgggctcaaatgattctcccatctcagtctcccgagtagctgggactacaggtacgtgccaccatgctgactaatcttttctttctgtttttctttctttctttttagtagagatggggttttgccatgttgcctaggctggcctcgaacttctggactcaagcaatctgcctacctcagccttccaaagtgtcaggactacaaagtgtcaggattgtttttgttttggtttttttaaatacccgtaacagaccaagtaggggaggccaacacaggaggatcacttaagcccaaaagttcgagaccagcctgggcaacatagtgagaccccatctgtatgaaaaattttaaaaattagccaagcatggtggtgcacatctgtactccctgatactcagaagggtgaggccagatgatctcttgagtccaggagttcaaggctgcagcgagccataatggagccactagactccagcctgggcaacagagcaagaccccatctctaaaaaaataaaacaaaatacccattacaatagatcttatccacaagcctcattcctcctttcctccctccataaggaaatgaggtaggatgaggtcgccagaagagactcaagccagccttctctgggactctgctgaaaatgctccttggaagcttttggaagttttaatgtcaggtgaccagcttcctggaatttctgtgctgcaagggtggattcatgctgattgggtgcatggatggcaagaacaggcctggaaaacatcgcgtagctcaaactggcatcgattgaggctcattgcctcaaaggaatgaacatcagtaggattcttatgatttcagatttcatgtgctaagtgcacctttactaatacatttaggttcacaactgcttgactcaaataagccaagtatattgtataatatgtgacctcacggtaccctgaagcaaacagatttggggacattgattaaaggcatgttcctcatgtggccttctacttgaccctcagctatctgaattggcgaagctttcatgtggctaggataatgctacccacaatcagtgtggcagctcagtgaatgcctgggctttgtctcttcccacccaacgagccccattcaagcccccagggggaagaaaaggagataaaaagacaaagctgtgcacagcccagcgcttctcctctctagctgtgcccaggacagcttttggcttgggctggtccatcctgcagacaagggcagagaaatcaaagaaaccatcacagatctgtggggcaggaaaatgagcctggtccagctttcacagctctctgagatggggcatgttgggaattttagccgatttaataaaagttgcagcatgagacctgtgaatcccaccctgctgcttcctggatcctgccacaccccatccagcagcaaccaagccagtctcgcccctgactgggacagagtggctgagaggggctctggagccagctgcctggatttgaatcccagctgtgccacttaccagctgtgtgactgtaggtgagttatttcacctctctgggcttcagtttcctcatccgtaaatgaggatgatgatattataaaacccttaccccatgaggttattcattcattaaataaataatattataatttatatagttataattcattataatgaatattattcttattcattcattgttcatctacgcagagtgctttgaacttgcctggcatgtacggtaagctattattcattcaacagtataaactggccaggtgaggtgactcaagcctgtaatcccagcagtttgggaggctgaggcatgtggatcacctgagctcaggagttggagaccagcctggccagcatggtgaaactccatctctactaaaaatacaaaaattagccgggcgtagtggcgggcgtctgtaatcccagctactcaggaggctgaggtaggagaattgcttgaacctgggaggcagagattgcagtgagccaagattgcgccactgcactccagcctggatgacacagcgagactctgacacacacacacaaaaaataaagtttaaacttcccaaatcctatgacattgtactattatcatggtaaagaacactgagacagagggactaataacttgcccaagggcacacagctcacaaatagcaaaacggtggtcatgagctgaaagacttatgtgtttctgctctatgtgataatatagggtggtgcaaaagtaatttcagttttttccactacttttgaaggcaaaaactgcaattacttttgcaccagcctaatatgtatgttaggttcccattgctgctgtaacaaattaatacaaacttagtggcttaaaacaacacccgtctattctctaacagttctggggatcagtagtctgacctcactgggctcaagatgtcagcagggctggttccttctggaggcttcaggggagaattcattttcttgccttttttagtttccagaggctacagcattccttggctcatagtcccttcctgacatctgtccaagctcttgtttccatcttcacctcttccactttgaccttcctacctccttctaacaagaactcaagggattacactggggctacctggatcatctggaataatctccccgtctccagatccttaacttaatcacatctctaaagtaccttttaccatgtaaggtaacatattcccaggttccagggtttagggcatgactatcttgagggaccactattcagcctaccacagcatgttcacatttcaataactggactggatttctgggtttttttccagaaaagtcatagcctgagtttttatgaaaaagtaaaaagtatactatggtctcttggctttttgtagggtagatgatagaaagatggaacaatagatcagaaataatgaagatgatgatgatgatagccaacatttgcagagtgttcagcttccaagtagtttacaggcattacttcttttagccgtcaggcaataggatcaggtagggaggcgtgagaactattcccattttacagatgagaaaactgaggcatagagaggtgacatagtcacatggccaaggtctcacgggtggatgtggtagagcctggatgagagcccaggatgcctggctcccacagcccactcagaccctcgggcacttctgcccaggtgtcaggacggtgccagcggtagccttacagggtgtcagagtgctaatgcaaggtggcaggcctccaagatgccattctgaggggtttctctttggtcaattcaggaagctactctttgtccgtgcgagactacgaccctcggcagggagataccgtgaaacattacaagatccggaccctggacaacgggggcttctacatatccccccgaagcaccttcagcactctgcaggagctggtggaccactacaagagtgagtcccaccccaggggtgacatccccaccacgatgggcccacagactcctagtcacggatgcactgtggcccctgagacctgctgtgtccttcttggccatcccctagacagatagttgctttggatgcttctgaaggcttaggactgttgagcaggagggtgaggtggccaagatgtagaggtggcaccccgtcacactctgcttgcttgggaatgtctctgatggtggcaaccaggtggaacactggagagatccagtggaccaggtagggcggcctccaaggagcaacctctggctggctcggtgcttgttgctctcaattgaccagggactctgttccagaggggaacgacgggctctgccagaaactgtcggtgccctgcatgtcttccaagccccagaagccttgggagaaagatgcctgggagatccctcgggaatccctcaagctggagaagaaacttggagctgggcagtttggggaagtctggatgggtaaggacccagggccacagcccacagggccagagggtggaggggagagggaggccacttgcttccaggaacaccttatggcaaagcgggaatgctacccaaggcagagggggagatttaaataatagccataaagaagcagttccctgatagcaaaccaaattgtcttgctgtgcaaacactgatttgcctttgagaccagtcctgtagtggtcaaaaacttccttctgggaagcaggtgtcatggatgaggaatccctccctcatacggagtggggactgcctaacagtttgggattgagataaccagagaccttttcagatgatgaaaattaagaatggggaaatgcagcttggagatttccaggcaactgatgaacaggttattctgagcacctgctgtgtgcccagcactgttagggtcttgtgggaaaatcagaaaggcacatctcacacctgctgattttccccaagaacttaagaacaacactgcctgctttgcagggctgtggggtagatgcagtgccagcccagtgtggggcagcctgctgtgttaatacgttccaaatgggagcgttccaaatgggagcgaagacaacttacagggatgcaaacaactcagccagataaaataagtttaaaatccatgtatttcgactgtatttattgcgattctgctgcatgcaaggccgggcacagtggctcacgcctgtaatcccagcactttgggaggccgaggcaagtggatcaatcaaggtcagcagttcgagaaaaacctggatagtatagtgaaatcccgtctctacgaaaaaatacaacaattagccaggcgtggtggtgggagcctgtaatcccacctactcgggaggctaaggcaggagaatcgtttgaacccaggaggtggaagttgcagggaaccgagatcgcaccactgcactccagcctgggagacagagtgagactctgtctaaaaaataataataaaattaaaaagaatttgacaaaaaagaaaatatggagaggaaggtaagacagatctgagtggtgagatttgaaagccaaaaatatcatataagacgctagactcctactacaggaagcccacggttctggattggagcttcctggaagccaaggcaaaatggaaacccaagcaattataaaattgacaagacccaccaaatgaagcagggtggggtgaggggagggaacagcatgtgccaaatccctgtggtgggaggtgagttgggtgcttgagggactgagtgacctgcagggtgactggcacataaaaggcaaggggagtttagtggctgatgaggctagaggggtggacgaggctgggtcatgtagggcctgggggtcatagtaagtctggcatttatttaagagcagtgttaagattaaagtgggcggtgtatgtgtgtgacataacctgagtagtgttttaaagctatttttatttgtttgggttttttgtttgtttgtttgtttgagacagagtctcgctctgtcacccaggctggagtgcagtggctcaatcttggctcactgcaagctccgtctcctgggttcacaccattctcctgcctcagcctccccagtagctgggactacaggcgcccacaactgcgcctggctaattttttgtatttttagtagagacggggtttcaccgtgttagccaggatggtctcgatctcctgaccttgtgatccgcccacctcggccccccaaagtgctgagattacaggcgtgagccacttagagctatttttaaatccttgcaacagcacttcaaaggcaaagcttaccatttccactttacagatgaggaagctgaggaagccacggctcagagacgttaagccacttgccctagtgtgcacagctgggaagtggtgaacccgcctttcaacccacagttgtctgaggcctaagcccatgatttcgcttccctctctgagagttgagatgagcaggaaagactttctggaggaggcgggtctgcagctgggccttctagggtggtacgggagaccagtgggctctgaccaccttccctgctctctatccccctccagccacctacaacaagcacaccaaggtggcagtgaagacgatgaagccagggagcatgtcggtggaggccttcctggcagaggccaacgtgatgaaaactctgcagcatgacaagctggtcaaacttcatgcggtggtcaccaaggagcccatctacatcatcacggagttcatggccaaaggtgctgcgtgctggggctgggggtgcaggctgtggcctatactggtcaattgcgggcccaagggtggcttggacatggttcttgcccttgagatggccccaatctggccaggagctcttccaacaagtactcattgagaatctaatgtggaacaatccagccctcctggttagtggggtgaaatcatgttaaggggtcaccaaggggaagggagaacaaggggctaccaggagaagggaatggggccagaatactcctgggcaatgggagaaggggcttatggttcacagtgagccttagaggccagggtgtggcatgggtggtgggggtgccactctcccgcatcagccaccttccctgtacttgccaaagccctgggagagggagctggcaaagcagcagttctgcccccacccccgccctgccacaactcaggatttcttggggaatttttttaggccactgtttcacaaccattttcaacccctgccattttttgtttgtttgttttttagggacaggaacttgctctgttactcaggctggagtgcagaggtgcaatcataactcctgggctcaagtgatcctcccaccccagccccccgagtggctgggaccacaggcccatgccaccacactcagctaattttatttatttatttacatatttatttttagagacagggttgccctctgcctacccaggctggagtgcagtggcgtgatcatagttcactgtagcctcaaactctcaggctccaggatcctcccgacttagtctccccagtagctggcactacaggcatgcactaccacacccagctaatttctaaaaaaattttttttttttttgagacagagtctcactctgtttcccaggctggagtgcagtggcacaatctcggctcaatgcaagctccacctaccaggttcacgccattctcctgcctcagcctcccaagtagctgggactacaggtgcctgccaccatgcctggccaatttttttgtatttttagtagagacggtgtttcaccgtgttagccaggatggtctcaatctcctgaccttgtgatccgcccgcctcagcctcccaccatgctggaattacaggcgtgagcaactgcgcccagcttctaaaatttttttctagagacaaggtctcgccatcttgccccagctggtctcaaactcctgggttcaactgatcctcccaaagctttgggattataggcatgaaccactgagcctggcctaacatatatatttgtaaatttcttctatagatggggtcttgcgatgttgcccaggctggtctcaaactcttggcctcaggtgatcctctcacctcggtctcctaaagtgttggaattacaggagtgagcctcgtgcctagccactctgcccattttttgataaacagaatcatctcatgcaatcccatttagtgcgatttgaaacctcaagcctttttcattttaactatgcaattatgccagtcctgtgaaggcatgatcccagccatccaggctcaggggctgtctcagtcacagaatccatctagcaatcaaaaagtcacttcactaaaactcaattctctttctcaaacactaggaattgcaaacaaatattcgtatttaaatctactactatgaaaaatcttcaccacacactaaagtactagattggtgcaaaagtaattgtggtttttgccattaaatagtaaaagtagtaaatgttcctcccctctcccccatataggaagcttgctggactttctgaaaagtgatgagggcagcaagcagccattgccaaaactcattgacttctcagcccaggtgagagcctaacgaggaaacggggaagggaaacaggaattcgatttttttacttgccaaatatttactgaccacatactatgatgatagcagtaataataatgggtaaaatgtattgagagctcagtataaaactatgttttttgcatatattttattatacatgtactcattcatttaatcatcctataagctttataggctgggatttttgttatctattttggtataacaaaccatccaagtcctagtagcttgaaacaacagcaattgttatttctcatgatcctgtgggttgcctgggttcagctgggtggttcttctgctcgtcatggtaaagtgaggtgcagatgttggcacttgcccaggctagaatgtccaagacatggctcagcctccagggtctctccacatagcccctcaccacccaatcacccagcctgagcttcttcacggcgcagcagctgggttccaagacagagctggaccaggggccaagccttcatgagcaggctctcattaagcctctgcctgcatcaggcttgctaatggcccattggccaagtcacatagccatgcccagaatcagtgtgggaggggactgaccaaggacacaaatcccagggaccccctcaatgtaacagtctggccacagagtaggtaattatcatcccattttacagaataggaaattgaagcatagagcagaagtaaagtacagatgtggaaactgagccccagtgtggttaagtggcttgcacaagttactgtgctaattatgggggatatagcagtgaacaaaatgaaaatgttcctgtcctaatagagttcacaatccaggtgggaagatgagtattaaataaccaaatctcttagagaccatgacccaagtggtcctggctgagtcaaaagagcacagtatctaacaaagtaaataatgttcacaaatcgcaaaaacactgctgaaaacctaattttctttctcatgttccccacgccccttgcagctcctctcacccccagcctaagcagttttttcacttctgtcctctctcatgctctctctgatgtctgggaaaacagagtgtaaggacggggtggtattagagtgcatagctagagcatttagcctggtccaggagcaatcagagaatgcttcctggaggaagtggcctctaggccgagcctgaaggatgaatagaagttcagtagatgaagagaaaaggtaaaggtcttttagacaaaagaaacagcctgtgcaaaagtaggtgaaggagttcagcctactcagcaggagcccagggatagtgggagttgagtgagaccctgcctgggcctcagctgggcctgctggagatgccaagggcagggctcatttgagtatgcaaattcaggggcccagaggacaccacaaagtgtaacaaaagactctactttcagagcctggaatgccagaggcatatggaaatgtgttttcactcctatgggccaggtcctctgggagacaatagactggtctgttgctaaattatcatcttcaaactagcagaagccctgctgggcagcagtcaccgaccagggcaagagccactctgcccgtttcacagaggggaaaacaaaccaagggaggaaaagaggttctgggccttcatctgtccagaagcagaggtagattcagagcccagggacagaaaggagcccacctggggctttggtcttcacctccagactcagagaggcagcttggagcagcaggtggagaactggaccacacatgtggggtttctgtagtcacagctttgtgggtgacatgaaatgttattcagtagctgcatatatacaaacaggtcaaaacagagctgctctgactgaagcagggtggggggcttatctgtggcctttcttttgtctcccccacccccatataaccttgaggcatccataggattcagttggaagagctctacaggtccttccagctctgatgctgtgactccctgatactctttggaagcaaacccaagggtgcccaacctcatggcaccctatctgggggtcatgaaatctcaccgcctttatcaacccgcagtgcttacacctgggcccaataaacctactcgttattcattcagtcagcagaccctggagaagcaacactattagcatctgggcttaggagtcacacagagttttgttttgatctcagctctgcctgtgtagcctcaagcaagttgcttaacctctctgagtgccactttcccccactgggagcactgggagccactctttaaataaatacttaactatgtgccaaacactctactaagcccttgatgtaggcttaggggattcatcttcacatgaccccttggaaccaggtgctattacagagaagaaaagtgaggtacagagagatgacacaacttgcttgacatcacagagctgcagcgctcaagctgagttggtccagctccagagccatttagctattaccctctgctgtctcctaagtggggtgtcatccctgccccatcgagctcctgtgaaaatcagtagcatatgagcatctgccagtgagcatcaaacagtggtaactaccagcattagtccttgctccagaagaaaagcaaggcaaaaaagctgggccaagtaacaggtaagtgcgtggaccccaagcagcgcttttggagctccagccctggctccgcaacttgcaagctgtgtaagctggggccacttacctatttctctgggcttcagttttcttatctgtggaaatggggctgataacaaaagtgcctcctccaaagcacatggtaaatgtcacataagtgtttaagtatcatcttataaataagctatgatgccttccattagcatcataacttttgttaactgttcatctaaggactcataaatttcccacactcccagggccaagatgctgtctcactccaccctggcaacctcatccccatttcgtccccaccccccactattctaaacaaaatcagagtctcttccaagtttttactgaaaaatttgggtctctgggtctcccttgggcatgacagctcaggcctgtaatcccagcactttgggaagctgaagcaggaggatcctttaagcccagcctgggccacatagtgggacctcttctctattaaaaaaaaaaaaaattctttttaaatttaatctggcatagtggcatgcacctatagtaccagctgcttgggaagctgaggtgggaagactgcttgagcccaggaggcacaggttgcagtaagctgtgatcccaccactgtactccgtgacagagcaaggccctgtctcaaaagaaaaaaaaaaagaagaaagaaaagaaaaaagcaaagcatgggtctccattctaactgcctcgggtgccccctgctgtccaccccttgcaagtgcgccacccacttgcctcagaccttgagaagccggccggtggtgctttgattgttctgtctagtcagacgccctcacttccagaataatttcatcagactgcacccagctgcagtctgccggagcactggagtgctgggttatttagaggcagcaggatgcactggattgggagtcctcagactggtttgagcctgacattcagaattttcctggtggtgtgatctggaacaagtggttccatgtctgtaaaacagagattatgatcattcctgcctcaaagagctcaagcccagtttgtaaaccaaaagtgctgctttctgggcatctgagggttcatcttcaaccgcttttgtccaaacccttgtaagtaaaaatgtctgcaagatataatccctgtgttttcatcagaggcttctagggctcctggtgtgaataagaatcctccacgcagtctgttagtcactcagcagccatggtgatctttaaatgtacatcagaacatgtcacgctcctgctcgaaggcctctaatatctccccaacacgctcagaataaaatccaccctcctctcctgacctacaaggcagttcatgattggcggcctccctctcaacttcaactctccccactctctctgtggcatcttctgctggccacactgacctctgtgctgttccatgaacacccaagctcttacctacctccacgcctttgcatctcatgttctctctgcctagaatattcttatgcgacacacttattattatcatcattcagatctttgctaaaatctcaccccctcaaagcaggtttccctgaacgcccaatccaaaaaagctctctacaggtcatattttgttactttgttttatcttttttttctttttgagacagagtcttgctctgtcgcccaggctggaggacagtggcacgatctcggctcactgcagcctctgcctcctgggtccaagcaattctcgtgcctcaacctcctgagcagatgggattacaggcgtgcaccaccatgctcatcttctttttgtatttttagtagagacggggtttcgccatgttggccaggctggtctcgaactcctggcctcaagtgatccgcccacctcggcctcccaaagtgctgggattacaagtgtaagccaccatgcccggcctgttttatcttttctttatggtacttaccacctgcaggggctttgccgggctcatcacctgttcaagcaacatgtctggcacccacaagacactcagtggatttctgttgagtaaataagtgaattttccctacccaggctggggcatgaggaagatatgagaggtatagcagaatatgacatgaacctgggttgtccccagaaagagagttgaaggtgaaagctcttcatagtatcctagggttcgtgtgtgtgtgtgtgtgtgtgtgtgtgtgtgtgcatgtgcacgtgtgtgtgtatgtgtgttcctggaagaataggtcctggagaaatagtcccattgctttttccctgagaacatttcaaagtgctctctggaagtcttggaattctagagaatcccccaaactggcccaggcctccttagggatccccctaacctgaatgggttgatggaggaatgccaccctgagccctggggccctcccgacacaaaagggagggctggtgcagacatttcgcattttcttcacttgaacacctctctgctgcttttgggtggggccatcttggcgtaggccaggtctgaggacaaaggtgtctctgtttggggtgcagattgcagaaggcatggccttcatcgagcagaggaactacatccaccgagacctccgagctgccaacatcttggtctctgcatccctggtgtgtaagattgctgactttggcctggcccgggtcattgaggacaacgagtacacggctcgggaaggtagggaacgctgccaagcagccccacgttgcccatttggatgcttgtgagtgttgagagttgatacttgtgagagcgattggtaaaatgcaagggactgccccagtactagctgtgcattcttgagcttggtggatccttctggataatgtcctgaacttcagagtctcactcagagattttgaggagattttagatcagattgagaagtactgatagattttagagggagtgggcaaatatatgtcgaaattaagggtaagagcagctttgtgcataacagacaaaaatggggagggtatccaaatgtccatagcaggaggatggattgtggtatattcacacaatataataccacgcagtgatgaaaaagcacaaactggccaggctcagtggctcacgcctgtaatcccagcactttaggaggccaagactggaggactgcttgagcccagaagctcaagaccagcctgggcaacacaggaagacctagtctctacaaaaatttaagaaattagccaggcatggtggcacatgcctgtatgcctgtagttgtggctactcaggaggttagggtgagaggatcacttgagtctaggaagctgaagctgcagtaagccatgatcatgccactgcacccagcctggtggacagagcaagatcttgtcaaaagaaaagaaaagaaaagaaaagaaagaaagaaagaaagaaagaaagaaagaaagaaagaaagaaagaaggaaagaaagaaagagagagaaagagaaagaaagaaagaaagaaagaaagaaagaaagaaagaaagaaagaaagaaagaaaagaaagaaagaggcacaagccaatgctaaatgcaccaaaatgggtaactctcacaggtataatatcaaaatgaaagaaattagaccaaaaaaaaagagtagatgccacttggtttcgtttttgtgaaattctaaaagagacaaaacatgtaattggacattcatggcagcattcttcctaatagccaaaaaatggaaacaacactctttaatgtccatcaattgatgaacagacgaacaaaatgtgatatatccatacaatggaatattatttggccataaaatggaatgaagtactacgccaggctagaacacagatgacccttaaaaacattttgttaaaggaaagccaacatgaagaccacatgttgtataattccccttctatgaaatgtccagaagaggcaatcttttttttttctttgagatggagtcttgctgtcacccaggctagagtgcagtggctcaatctcagctcactgcaacctctgcctcccaggttcaagcgattcttgtgcctcagccttctgagtagctgggattacaggcgcacaccaccatacccagctaatttttgtatttttagtagataacagggtttcaccatgttggccaggctgaactcaaactcctgacctcaagtgatccgcccgccttggcctcccaaactgctgggattacaggtgtgagccaccatgcccggcccagaacagacaaatctaaagagacagaaagtagattattggtgcctacagctggtggtggggagttgggagaaatgaggagtgacttctgtgggttttttgcagggaaatgtgatgaaagtattctaaaatccacaactttgtaaatattctgaaagccacggaattatacactttaaatgggtgaaatgtatggtctgtgaattctatctcgataaagctgttaaagaaagaaacaggcaaaatttatttatagcactagaggtcagaattgcagtcacctttagtttctgttagcctaatatttatttatttatttatttatttatttatttatttatttatttattttgagacggagtctcgctctgctgcccaggctggagtgcattggcgccatctcagctcactgcaaactccacctcctgggtttaagtgattgtcctgcctcagcctcccaagcagctgggattacaagcatgtgccatcatgcccagctagtttttgtatttttagtagagacagggtttcaccatgttggccaggctggtctcgaactgatgacctcaagtgattcacccacctgggcctcccgaagtgctgggattacagatgcgagccactgtgccagtcctatttatttttttaaagagacgggtgcggccgggcacagtggctcacacctgtaataccagcactttgggaggccaaggcaggcggatcacaaggtcaggagtttgagaccagcctggccaatatggtgaaaccctgtctctactaaagatacaaaaattagctgggcgtggtggcaggtgcctgtagtcccagctactcgggaggctgaggcaggagaatcatttgaacccgggaggcagaggttgcagcaatgagccgagattgtgccattgcactccagcctgggtgatagagcgagactccgtctcaaaaaaaaaaaaaaaaaaaaaagataggtgcttgctctgttgcccaggctgtagtggaggggtgagatcatagctcactgtagcctccaactcttgggctcaagcaatcttccagcctcagcctcctgagtacctgaaactacagatacgtgctaccatgcccagctaattttttaattatttgtagagatagtgtctcactgtgttgcccaggctggtctcaaactcctggacttacgtgatcctcctgcctcaggctctgaaagtgctaggattacaggcatgagccactatgcacaggctgcagtcaccttaagtaagggggtattaactggaaggacgcagaaaggagcgttctgaaatgctgaaaatgttctacagcccaatctgatggtgattacaagggtatatatatatatataaagctgcagcaaaatggatattaaagatttgtgcatattatttcatgtacgttataactcgattaaaaaaaatttagaccgggcacagtggctcatgactataatcctagcactttgggaggccaaaatgggcagattgcttgagcccaggagttcaagaccagcctgggcaatatagcaagaccccatctctacaaaaaatttaaaaataagtcaggcgtggtggtgtgagcctgtggtccctgctactcaggaggctgaggcgggagaatcgcttgagcccaggaggttgaggctgcagtgagccaagatcatgtcactgcactccagcctgtgtaacagagcaagactttgtctcaaaaaagtaaataaatagggccgggcacgttggctcatgcctgtaattccagcactttgggaggctgaggtgggaggatcacgaggtcaggagatcgagaccatcctggctaacacggtgaaaccccatctctactaaaaatacaaaaaattagccaggcgtggtggcgggcacctgtagtcccagctacttgggagactgaggcaggagaatggcgtgaaagccgggaggcggaacttgcagtgagctgagatgacaccactgcactccagcctgggcaaacagagcgagaccctgtctcaaaacataaataaataaataaataaataaatgtaatgactaaaggaataaaagtagaatgtataatttctaaaccagaagaagataagcaggaaatcaagaaaagtctgtagatccaaaggaggaagggagaaaacatatacacacacacacactctcacacacacaaacacacacatagaacattttcaaaacttgaccatgtactcagtcataaagcaggtctcaacaaattccaaagaacatatattctatagaccatgttcaccaaccatgatataattaaactaaacactttttaaaaaaggataactatgccaggtgcggtggctcacacctataatcccagtgctttaggaggccaagatgggaggatcacttgagcccaggagttttgagaacaggctgggtaacataataaaacactgtctctacaaatttttctatttttttatattttattttattttattttattttatttttgagacggagtctgactctatcatccaggctggagtgcagtggtgtgatctcggttcactgcaacctccatcccctgggttcaagtgattctcctgtctcagcctgtagctggaactacaggcacctgccaccatgcccagctaattttgtatttttagtagagatggagttggccaggctggtctcgaattcctgacctcaggtgatcctcctccttggtctcccaaagtgctgggattacaggcacaagccaccatacctggccaaaaaaatttttttaattagcttggcataatggggcacacctgtaaccccaggggcttgagaggctgaggcaggaggatagcttgaggtcaggagttcgaggcttcagtgaactatgattgtgccactgcgctccagcctgggcactctgtctctaaaagaaaaaaaaaatgaaaaggctaactaaacccatgtcagactaggtgggaggaagggcgggtaaagggagagacacatagtgactggtgggaacctcatgggctgagagccagaatcctcccttttcccatcgcccaggatgagaggactgaggcatcagctgcaacctggactcaaggccccctgaagtccttctgtccccaaagacctgtgacctctgggattccactcttcggagttgcagttaactggggtatcagctgaatcaacgaggaggattctagagtgaacttccacaccataccccaggcccctaagcccactcctccttgtttagccatctgtcctcaggatggatgtcccttgcttccacagggaggccacgtatcagggaaattgcaggtctgcaggggcagatgttggcagctcttgcccttgcctgttcccccaccttagcagagccaaccctcactactccccagccttccccgactctgctctgttcaaccctgcaggggccaagttccccatcaagtggacagctcctgaagccatcaactttggctccttcaccatcaagtcagacgtctggtcctttggtatcctgctgatggagatcgtcacctacggccggatcccttacccaggtagggaaggggcatcagctcagggctgctaccagggcccagtctggcaatgggctcatctcaacaacatgtccattcaaactgagttcttgatcctcacccccaaccttccctcacctttcctgtcttagttaaaggcacctccatccatctaatgtcttaagcctgaaatctgggggcttccttggcccttccttctctctcactcctatgactttttttttttttttttttttttttgagacggagtctccctctgtcacccaggctggagtgcagtgacgtgatctcggctcactgcaacctccgcctcccaggttcaagcgattctcctgcctcagcctcctgagtaactgggattacaagcatccaccaccatgcctggctaatttttgtatttttagtagagacggggtttcaccatgttggccaggctggtctcgaactgctgaccttaggtgatgcgcctgcctcggcctcccaaagtgctgggattacaggcgtgagccactgtgcctggcctcacccctatgacatctgagcagtcacagggttttggccactcgactccaaaacatatcccaagtctcaccactttgaaccccacagtctccactgcatccaggccagcgtcatctcccatagatggtgcagcggcatcctcatcagtcttactgctttctccctcctcgtcctacagcctattctccacttgcagccagaaggataattctaaactttaaatcagatcttgtcctttctccaccttttttttttttttaagacaaggtctcactctgtcactgaggctgtagtgcagtggtgtaatcatagctcatggcagcctcgacttcctaggctcaaatgatcctcccgcttcagcctcccgagtatctgggaccataggcacatgccaccatgtctggctattttttatttttttaatttttttgtagagacttggtctcactacgttgtgcagcctggtctctaacttccaggctcaaacgatcctccagccttggcctcccaaaatgctgggattacagacacacaccaccatgcccagctaattctttaaattttttgagagacaaggtattgctatgttgccgggctggtgatttccatttttaagcgatgctttcagcatggagagtgaatgggagggaaagggaacagggtggcagccagtgaggaggccacagcagtggcccaggcagaggtgatgatggtctggacagggtggtggcattcgtgactggcatacgttgatgaactggtgctacgtttcaaaaggagaaaagatctgacttgctgacttaggaggtgagagagagagaataaaggatgattaccctggctttgcaccacagggtgggtaatggtctagggatagaaattggagagctctgttttagctctgctaaatttgagttgacttaaatatagagacatccaagtaaaggaagcacttgagttcatgagtttggagtttgagactaataatataaaattggggatcacagacattgaatggctattcttatgaatagctaatagaaacttgaactgaacaaaaaaatggtcccacccataggttaacattgaatctggccacctgaatgttttgtcttgagggtgcactagtcaaaaccaggcaacacacaatagacgctgaatccattaggatgtgttccacagcaagcaacaaaataacagacaaagagtaactgaaatagaagcaatctattactcccaatcttccattggtgactggttagttcagcaactcagcagctgtcaggactctgggttcctgtctctatgatggtcttctccatgttgtcagctccaagtatcataagtatctcacagtgttcaaaggaagagatgaagggtgcgttctccaaagactctcctctaagcgggaggaaaaacctttccatcactttcccagcagacctccccatcagctcccattggcccaaactgggtcccaggcccatgtcctagctgcaagtgaagctgagggtggaagtctgtctttcacagtggaaggggctcagcttgcaaggtgaggtggggagtgatgcctgctggggaggccacagggcctgccacccctgggctctcatttcccaactgcttccgtttctaattccacggctccttttcagggatgtcaaaccctgaagtgatccgagctctggagcgtggataccggatgcctcgcccagagaactgcccagaggagctctacaacatcatgatgcgctgctggaaaaaccgtccggaggagcggccgaccttcgaatacatccagagtgtgctggatgacttctacacggccacagagagccagtaccaacagcagccatgatagggaggaccagggcagggccagggggtgcccaggtggtggctgcaaggtggctccagcaccatccgccagggcccacacccccttcctactcccagacacccaccctcgcttcagccacagtttcctcatctgtccagtgggtaggttggactggaaaatctctttttgactcttgcaatccacaatctgacattctcaggaagcccccaagttgatatttctatttcctggaatggttggattttagttacagctgtgatttggaagggaaactttcaaaatagtgaaatgaatatttaaataaaagatataaatgccaaagtctttaccaaaa

SEQ ID NO: 476 - DNA, 2089 bp, Homo Sapiens
ctggtcccagctcgggagcacatcagaggcttagaggcgagtgggaagggactcagacagtgcaggacgagaaacgcccgcggcaccaaagcccctcagagcgtcgcccccgcctctagttctagaaagtcagtttcccggcactggcaccccggaacctcaggggctgccgagctgggggggcgctcaagctgcgaggatccgggctgcccgcgagacgaggagcgggcgcccaggatggggtgcatgaagtccaagttcctccaggtcggaggcaatacattctcaaaaactgaaaccagcgccagcccacactgtcctgtgtacgtgccggatcccacatccaccatcaagccggggcctaatagccacaacagcaacacaccaggaatcagggagggctctgaggacatcatcgtggttgccctgtatgattacgaggccattcaccacgaagacctcagcttccagaagggggaccagatggtggtcctagaggaatccggggagtggtggaaggctcgatccctggccacccggaaggagggctacatcccaagcaactatgtcgcccgcgttgactctctggagacagaggagtggtttttcaagggcatcagccggaaggacgcagagcgccaactgctggctcccggcaacatgctgggctccttcatgatccgggatagcgagaccactaaaggaagctactctttgtccgtgcgagactacgaccctcggcagggagataccgtgaaacattacaagatccggaccctggacaacgggggcttctacatatccccccgaagcaccttcagcactctgcaggagctggtggaccactacaagaaggggaacgacgggctctgccagaaactgtcggtgccctgcatgtcttccaagccccagaagccttgggagaaagatgcctgggagatccctcgggaatccctcaagctggagaagaaacttggagctgggcagtttggggaagtctggatggccacctacaacaagcacaccaaggtggcagtgaagacgatgaagccagggagcatgtcggtggaggccttcctggcagaggccaacgtgatgaaaactctgcagcatgacaagctggtcaaacttcatgcggtggtcaccaaggagcccatctacatcatcacggagttcatggccaaaggaagcttgctggactttctgaaaagtgatgagggcagcaagcagccattgccaaaactcattgacttctcagcccagattgcagaaggcatggccttcatcgagcagaggaactacatccaccgagacctccgagctgccaacatcttggtctctgcatccctggtgtgtaagattgctgactttggcctggcccgggtcattgaggacaacgagtacacggctcgggaaggggccaagttccccatcaagtggacagctcctgaagccatcaactttggctccttcaccatcaagtcagacgtctggtcctttggtatcctgctgatggagatcgtcacctacggccggatcccttacccagggatgtcaaaccctgaagtgatccgagctctggagcgtggataccggatgcctcgcccagagaactgcccagaggagctctacaacatcatgatgcgctgctggaaaaaccgtccggaggagcggccgaccttcgaatacatccagagtgtgctggatgacttctacacggccacagagagccagtaccaacagcagccatgatagggaggaccagggcagggccagggggtgcccaggtggtggctgcaaggtggctccagcaccatccgccagggcccacacccccttcctactcccagacacccaccctcgcttcagccacagtttcctcatctgtccagtgggtaggttggactggaaaatctctttttgactcttgcaatccacaatctgacattctcaggaagcccccaagttgatatttctatttcctggaatggttggattttagttacagctgtgatttggaagggaaactttcaaaatagtgaaatgaatatttaaataaaagatataaatgccaaagtctttaccaaaa

SEQ ID NO: 477 - protein, 504 aa, Homo Sapiens
MGCMKSKFLQVGGNTFSKTETSASPHCPVYVPDPTSTIKPGPNSHNSNTPGIREGSEDIIVVALYDYEAIHHEDLSFQKGDQMVVLEESGEWWKARSLATRKEGYIPSNYVARVDSLETEEWFFKGISRKDAERQLLAPGNMLGSFMIRDSETTKGSYSLSVRDYDPRQGDTVKHYKIRTLDNGGFYISPRSTFSTLQELVDHYKKGNDGLCQKLSVPCMSSKPQKPWEKDAWEIPRESLKLEKKLGAGQFGEVWMATYNKHTKVAVKTMKPGSMSVEAFLAEANVMKTLQHDKLVKLHAVVTKEPIYIITEFMAKGSLLDFLKSDEGSKQPLPKLIDFSAQIAEGMAFIEQRNYIHRDLRAANILVSASLVCKIADFGLARVIEDNEYTAREGAKFPIKWTAPEAINFGSFTIKSDVWSFGILLMEIVTYGRIPYPGMSNPEVIRALERGYRMPRPENCPEELYNIMMRCWKNRPEERPTFEYIQSVLDDFYTATESQYQQQP

SEQ ID NO: 478 - DNA, 2092 bp, Homo Sapiens
ctggtcccagctcgggagcacatcagaggcttagaggcgagtgggaagggactcagacagtgcaggacgagaaacgcccgcggcaccaaagcccctcagagcgtcgcccccgcctctagttctagaaagtcagtttcccggcactggcaccccggaacctcaggggctgccgagctgggggggcgctcaagctgcgaggatccgggctgcccgcgagacgaggagcgggcgcccaggatggggtgcatgaagtccaagttcctccaggtcggaggcaatacattctcaaaaactgaaaccagcgccagcccacactgtcctgtgtacgtgccggatcccacatccaccatcaagccggggcctaatagccacaacagcaacacaccaggaatcagggaggcaggctctgaggacatcatcgtggttgccctgtatgattacgaggccattcaccacgaagacctcagcttccagaagggggaccagatggtggtcctagaggaatccggggagtggtggaaggctcgatccctggccacccggaaggagggctacatcccaagcaactatgtcgcccgcgttgactctctggagacagaggagtggtttttcaagggcatcagccggaaggacgcagagcgccaactgctggctcccggcaacatgctgggctccttcatgatccgggatagcgagaccactaaaggaagctactctttgtccgtgcgagactacgaccctcggcagggagataccgtgaaacattacaagatccggaccctggacaacgggggcttctacatatccccccgaagcaccttcagcactctgcaggagctggtggaccactacaagaaggggaacgacgggctctgccagaaactgtcggtgccctgcatgtcttccaagccccagaagccttgggagaaagatgcctgggagatccctcgggaatccctcaagctggagaagaaacttggagctgggcagtttggggaagtctggatggccacctacaacaagcacaccaaggtggcagtgaagacgatgaagccagggagcatgtcggtggaggccttcctggcagaggccaacgtgatgaaaactctgcagcatgacaagctggtcaaacttcatgcggtggtcaccaaggagcccatctacatcatcacggagttcatggccaaaggaagcttgctggactttctgaaaagtgatgagggcagcaagcagccattgccaaaactcattgacttctcagcccagattgcagaaggcatggccttcatcgagcagaggaactacatccaccgagacctccgagctgccaacatcttggtctctgcatccctggtgtgtaagattgctgactttggcctggcccgggtcattgaggacaacgagtacacggctcgggaaggggccaagttccccatcaagtggacagctcctgaagccatcaactttggctccttcaccatcaagtcagacgtctggtcctttggtatcctgctgatggagatcgtcacctacggccggatcccttacccagggatgtcaaaccctgaagtgatccgagctctggagcgtggataccggatgcctcgcccagagaactgcccagaggagctctacaacatcatgatgcgctgctggaaaaaccgtccggaggagcggccgaccttcgaatacatccagagtgtgctggatgacttctacacggccacagagagccagtaccaacagcagccatgatagggaggaccagggcagggccagggggtgcccaggtggtggctgcaaggtggctccagcaccatccgccagggcccacacccccttcctactcccagacacccaccctcgcttcagccacagtttcctcatctgtccagtgggtaggttggactggaaaatctctttttgactcttgcaatccacaatctgacattctcaggaagcccccaagttgatatttctatttcctggaatggttggattttagttacagctgtgatttggaagggaaactttcaaaatagtgaaatgaatatttaaataaaagatataaatgccaaagtctttaccaaaa

SEQ ID NO: 479 - protein, 505 aa, Homo Sapiens
MGCMKSKFLQVGGNTFSKTETSASPHCPVYVPDPTSTIKPGPNSHNSNTPGIREAGSEDIIVVALYDYEAIHHEDLSFQKGDQMVVLEESGEWWKARSLATRKEGYIPSNYVARVDSLETEEWFFKGISRKDAERQLLAPGNMLGSFMIRDSETTKGSYSLSVRDYDPRQGDTVKHYKIRTLDNGGFYISPRSTFSTLQELVDHYKKGNDGLCQKLSVPCMSSKPQKPWEKDAWEIPRESLKLEKKLGAGQFGEVWMATYNKHTKVAVKTMKPGSMSVEAFLAEANVMKTLQHDKLVKLHAVVTKEPIYIITEFMAKGSLLDFLKSDEGSKQPLPKLIDFSAQIAEGMAFIEQRNYIHRDLRAANILVSASLVCKIADFGLARVIEDNEYTAREGAKFPIKWTAPEAINFGSFTIKSDVWSFGILLMEIVTYGRIPYPGMSNPEVIRALERGYRMPRPENCPEELYNIMMRCWKNRPEERPTFEYIQSVLDDFYTATESQYQQQP

SEQ ID NO: 480 - DNA, 2061 bp, Homo Sapiens
ggcgagtgggaagggactcagacagtgcaggacgagaaacgcccgcggcaccaaagcccctcagagcgtcgcccccgcctctagttctagaaagtcagtttcccggcactggcaccccggaacctcaggggctgccgagctgggggggcgctcaagctgcgaggatccgggctgcccgcgagacgaggagcgggcgcccaggtgagatggggtgcatgaagtccaagttcctccaggtcggaggcaatacattctcaaaaactgaaaccagcgccagcccacactgtcctgtgtacgtgccggatcccacatccaccatcaagccggggcctaatagccacaacagcaacacaccaggaatcagggaggcaggctctgaggacatcatcgtggttgccctgtatgattacgaggccattcaccacgaagacctcagcttccagaagggggaccagatggtggtcctagaggaatccggggagtggtggaaggctcgatccctggccacccggaaggagggctacatcccaagcaactatgtcgcccgcgttgactctctggagacagaggagtggtttttcaagggcatcagccggaaggacgcagagcgccaactgctggctcccggcaacatgctgggctccttcatgatccgggatagcgagaccactaaaggaagctactctttgtccgtgcgagactacgaccctcggcagggagataccgtgaaacattacaagatccggaccctggacaacgggggcttctacatatccccccgaagcaccttcagcactctgcaggagctggtggaccactacaagaaggggaacgacgggctctgccagaaactgtcggtgccctgcatgtcttccaagccccagaagccttgggagaaagatgcctgggagatccctcgggaatccctcaagctggagaagaaacttggagctgggcagtttggggaagtctggatggccacctacaacaagcacaccaaggtggcagtgaagacgatgaagccagggagcatgtcggtggaggccttcctggcagaggccaacgtgatgaaaactctgcagcatgacaagctggtcaaacttcatgcggtggtcaccaaggagcccatctacatcatcacggagttcatggccaaaggaagcttgctggactttctgaaaagtgatgagggcagcaagcagccattgccaaaactcattgacttctcagcccagattgcagaaggcatggccttcatcgagcagaggaactacatccaccgagacctccgagctgccaacatcttggtctctgcatccctggtgtgtaagattgctgactttggcctggcccgggtcattgaggacaacgagtacacggctcgggaaggggccaagttccccatcaagtggacagctcctgaagccatcaactttggctccttcaccatcaagtcagacgtctggtcctttggtatcctgctgatggagatcgtcacctacggccggatcccttacccagggatgtcaaaccctgaagtgatccgagctctggagcgtggataccggatgcctcgcccagagaactgcccagaggagctctacaacatcatgatgcgctgctggaaaaaccgtccggaggagcggccgaccttcgaatacatccagagtgtgctggatgacttctacacggccacagagagccagtaccaacagcagccatgatagggaggaccagggcagggccagggggtgcccaggtggtggctgcaaggtggctccagcaccatccgccagggcccacacccccttcctactcccagacacccaccctcgcttcagccacagtttcctcatctgtccagtgggtaggttggactggaaaatctctttttgactcttgcaatccacaatctgacattctcaggaagcccccaagttgatatttctatttcctggaatggttggattttagttacagctgtgatttggaagggaaactttcaaaatagtgaaatgaatatttaaataaaagatataaatgccaaagtctttaccaaaa

SEQ ID NO: 481 - protein, 505 aa, Homo Sapiens; identical to SEQ ID NO: 479

SEQ ID NO: 482 - DNA, 50775 bp, Mus Musculus
gcctcatgtggcccggcccgcggcggccggcggctgaaagcggcgaggcggcggcgcgcgaagcccggaaggcggcggccgaggcccaggcggcggaccggagcggcgggagcggggcccgggttggccctcgagcggccgccggctcagcatgcgcgcccgccgggggctgctgcggctgccgcgccgctcgctgctcgccgcgctcttcttcttctcgctgtcgtcctcgctgctctacttcgtctatgtggcgcccggcataggtaggaaggcgaccctgcggccaccccacgcctcttcccgctgcggcccgcgccgccgccccggccgaccccgcgctccgtgactcgccgtttcctgccgcgccaccccgcagcccgcccgcacacgcgggctcctgcctgacgcagccgcccgcgccctccgcggccgcgcgttggctgcccagacccggcggggctgcgggctgcgcgcccctttcccctcccccccctcctccctggagcccgccgctcgcccgccgctcatagcggacccgacctgctctggggaccgatgggaagtttgaattggccatggaggaggtgctgtgacaggggccttgaagaagcggtgccaggtggaagggaggggggggtcgcccagagaagaaacggaatgggtagcagttctccaaggtccgccctttagagggggagaccgcctggagagaaaacgagcccttcccggaacagactggacgctgatgagaaggcaaaggcagcgagagggttaaaggcagaggacactgaggtcagatgtcctgtatgaccttgggccctcagcttctcttctctgtaaaatggggacacgaatcccagcctttaaaggacagagggccataaatgccctttaagcttttctccctatagcggacgcccaacgtcttcgaaataaatacatacataataaataaatattcgctgttacaggtagtttgggggacagaaggaaagagttttaaggaatgcgacttgcctcccttagtgtggtcttggagtgctagtgaaaacttcagcccttggtgaaaaatgagaagatgctgttgggggtggggccgagggcgagaattctggatggttgggatgggtgccgcttaggggaagtgcctttgagatcggagtagtaaatgctggtgttccctgttgacctggcaactctgaactggcagagaaatttccagagaaagagggagagagggagagagtctctcccctgattatttttttttttaaagcttgtttcacttgatgtttaaagttggtgtttcatgctgtcagcctgacctgggaagatggaaaagctaacttgagactgtcctcactgatttggtgagtggcattccaccagggatgtataattattgtggcttgttaggcttgctaagtagaagggcaggaattctggctgaacaagaatagataactaattagtgaaattaattgagaagagagctcattagcgaataggatattagattctcacaaaatgagagtgaagtgataggtttaaacctgcaggcatcttccagccagaccctctatttttcttccttttgtgaaagtgacaggtgtttctggtctgggtctgtgtatctcctgtatctccatggtgatcagcctttttcgatgagaaagaatagaagccagactcttcaacagaaatgaaacttacttcagatttctctgtggtaggtcagtgaagctcctgtgtacgccaccaccgccaccaccaagcttagaatcccaaaccctgtgtcactgcaagactcaactctcttgagatttcattagtgactttagaagtgtttgagagaacagatccattgctattcaaagtctgttggcaaagaataggaccagcagtgctgggatgtggctgggtggtagagtggtacctagcattgtgcaaggttctgggtttgattcctgacacaaaccagaaaagggggtggaggggagtggtaaagaggagacatcttatagttcacatcccttcacttacagttaactatttgactgtttcatttatcctgcctttaaaaaagacatgtattttatgtgtgtgtctgttgtgtatgcatgtgtatctgtgtgccacatgcattcaatgcagaggacattggagcctctggaactggagttacacatagttaggagccaccctgttggtgataggacccgaacctggttcttccgcaagaacagcaagtgtttttctttgctgagccatcttgccagcctcttccatgcctttcttgttaacaaacttaatttctcaaatgtctagcttcctattgtgctgtggtaaatctttcccaaaggttaaagaagtttagagaatgtaagggtttatgttccttaggacataaaaaccttatttgagattgttataaaaatgagtttaaactgtgtatcatgatcatggtacacacctctaatcctagcatttgggagtcagaaacaagaggatctcaatgagtttgaggccagcctggtctacacagtgagttccaggacagctaaggctacatagaccctgtttcaaaaagttaaaaaaaagccgggcagtggtggcgcacatagaccctgtttcaaaaagttaaaaaaagccgggcagtggtggcgcacgcctttaatcccagcacttgggaggcagaggcaggtggatttctgagttcgagggcagcctggtctacagagtgagttccaggacagccagggctacacagagaaaccctgtctcgggaaaaaaaaaatactagagggttggagagatggcttatcagttaagaacactggttgtttcagaggacctgacttcaattcccagcagatacatggcagcttacaaccacctgtaactttgattccaggagacccattgccctcctctggcctctgcactaggtatgcacttgcatggtgcacagacaagcatgcatgcaaaacacccatacacattaaatttttaattaaattttttttttgagacaggttctctatgtaggacaggctagtcccagaactagtagcaacaaaaaataatttcatggttggggtcaccacagcatgaagaactgtattaaaaggtcgcagcattgggaagattgagaaccactgtgctagaggaatgcaagccctcttctggtagtgtcaggtacctccacatgtgtggcacacgcatacacccagacagacatctgctcacaaatttcagcattaagttatcatctagcatgagtgaggtcctggctgcaattcctgttgggggcggaggtgagggttgaaaaagaaggggaaggggagaagtcttgctgagctacctttccttgaagtccttccttctccacagcctgaggaatgtttgtttcttatcactgacctgccggcattggcatgccctcttcctttctagagaaaactttgatcttatttatgaccctctgactagaggaatttcagacctcagagcgcttccagcctgaccaggtctcttaaaggagaatagaccaatagtagacgcaggtgctggtgggaaaacatcctaataattttatggcccttcatttgacaagctatgtagagagcggctgcagacctctgctgatcttacaacaggatctctgagagtggtgctgcctgtggttaaggctaacagtgagctctctactgaaagtttactatttggagttctgctgttgccctttcggccgggtttttttctctgcttctttcactgctgaagaaaggaagtggggatggttttcccggtttggtgcacttagtcccaaggaagggctgatttgtggcgagtgaaagacaagaaagagcctgttgttcagatccctcctgatttgaccagataactttgaggaagtcatttggtttcccttatttgtgtgtgtgtgtgtgtgtgtgtgtgtgtgtgtgtgtgtatggaaatgtaatttgaaagggggtggggaggaaaggtgtcaagggctggagagatggttcagtggttaagagccctggcttctcttccagaggtcctgagttcaattcccaacaaccacatggtggctcacagccatctgtaatgggatcctatgcccccttctggcatgcaagtgtacatgcagacagagcactcatacatagaatcaacaaatctttaaaaacaactgtgaaatcaaggcaggatttcactcactctgtagcctaaacaggctttgaactttgaattgttctgccagtgccctttgagtctatgggcgagtcctgtgtgttaaaagacaattatatctcaatcaagataatgaatgatttagtatatggagtgctagtagtttgttaatattctaaagaagtactggactgaagattatagagaaagtacacttgctacataaccaaatagatgtttttctgataaatactggactgttcagattcccttacatacgtcacggcaggaaaaccctttgttgtttctgccttaaaaatgccttctgaatgtctccatgtccttactatatgaattttctggaggaaatacagattggggaatctgattgctttgggaaatgaaaaacctcctgctaagacactttctttccccttcagtgttcttttctgtctcaggttcacaaatgttgttctgttgagacatggtctcatgtagcccaggctagcctcaaactctccgtgtggtcaagcatgaactgaacagaattctggtctttcttccttcacctctcaagttctagacatgtctttgaatagtgccctccctcccttcctctgaggaacgtgtatagagggcaggctgacttgcagaaagaaaagtaccgctgctgtcagggctccgactaggttttctgtcctctggagagttcttgctgtcaaggagaggcctgaggtttggggttgagctggtctttggccgtgagaacaggtgctcctcctcccagactttaaggtccatagagctgagatcatgacagccaggaaggagagcccctttgccatgtcttctagagttctttgagagagtgacaacccaaagccacaatcgccaagacactatggactcaccaagacaccaccaactcactaggacactgctgactcgcctggtccctttgcttgggtttttgtgaccgtaacgggagggctgctgtggtctgtcggggaaaatcaggagttccctgaagctgggtagataagggctaatcagaagccagcagggtgggtgtgagcagagaggaggcctccagtcatcccatccagagctacccgggaagtcagagtcattgtccaggtcccaggacccacctctgactttacttagtattttgtagaccaccgagacaaagggaattaaaaaagtggttcagcaagttggcatttgcttgtcttgtctggttcccagatgctgtcagttctgactacagctttcacttcaaagggggcgtatcagccagactgagccattcacttgcccagagttaagaattgtgatggctcaagggcacatgcggcagacgaatggcacgattagttggaagaaacacatagaaagggaagacagtgtgtcctggagggctaagtcagcgtcaccagcagacccagcatagggaggtggagaggcctcactcatttagtcagcaggttgtctggtggcatccttcttgtgtactgtcagctgggggatagcctggaagtgagggcagagcatttctacccctgtggtccctcctaggggaaggttttgtgcttctattctgataggggatgagggtcacccttcacattttactatgcagaggagtcttgctttttccagcccctcatctaaggtctcagccgcaaacagggccctctagcctgggcttccagtctgcagagtggcagtgaagagcatgccttttgactctgggactttttatacagtgcttttgttcgaggagcgttcatgtgggatcctcccatgaattcaatttccccaagcatgagcagcaccttaaattattcagagagctgtcccttctcgaattcccctctttccccctttccctttgttaccttgagtgagcagttggttgccctggggggtattgttcctcctctggtgacacagacactgcctgtggaaggagcctggacattgttcccaggtgccttagttacctgcatcaattaagaatagctctttgaggtagggagcgacctcattatggagatgagctgtacaggtggcgttggagtagccgaggttgtgagtgtggagtggtgaacaagcaagcagagaactgggctgtaaattaatctctgtatgttactggacacaattctttgttactttaataaaagtcaaacacattctaataaatagcagtatggaggactattctttttcaccctccaggtgttccaaacactataatttataggcttttaaacatattacttaattctgtgtctagtaagtggaaactttgaaagatgagaaaagagaaaatgtattttcacctcataaaactgctgattgtgagggctcttccatttgtttgtttgttttttccctgaaacaaatatgtagatcaggctgcccttgaactcaaagattctcttgcttctcccatgtgcttaagctaaaggtgtttgccaccgtgctggacctagaatctatgttttaaaaaatgactttggaggcggtttagtgtagctcaagctggcctcaggtttgttgtgtgggagagtttgagcaagagctcccagtcctcgtgcccgtgtcttagtggttgtgtgccgccatgtctggcccagggggtttgcatgctagacaagcgcagtcccaatgaactgcatcccttttaaatgtgctcttgtgatgatcaggctggccttgaactccagatcctcctgtctctgccaggattataggtgtggaccactgtattcagctttatacaggaactagctactcttaggcagtaaggacagggttaggataatgaactaatcattcatggaacacaggtggcctctggaactgtggactctttactgtttgggtaccggacatgcagatgacctgactcctagtaattcccaccctaaaacctatgaaagcccactgggcagggcactggacagtccgcccttggtgcccttcccactcttgggaattttctctcacatttccttaataaaactgccattcattctgctcacttgttgttcctgttttcttactctcggatgtgaaacaacaaacccgaaagctgtaccctagcttcctgaggtaagcccaccaagagacagacttcatttcaggaaaagagccacgtcaagccgaggaattttgcttttgtgtttcttaaacacaaatcctaaagtattcttgctcagtttagcttttagatcagtggaccatttgtgattgtcagaaaatagtgtcttcttacataccgcactgttatcataactgtgttagctaaacctttattatcattcaggaaaatgacagaattgttggtttaaggaaatctaggccgggtggtggtgggcacgcctttaatctcagcactcaggaggcagaggcaggtggatctcttgagtttgaggccagcctggtctatagagtcagttccagaacagccagggctacacagaaactgtctctaaaataaaataagatttaaaaagcctaacttgtcttatactgaaagtatctgattttgcacattggtgttccactatcctattatatccacagcccttggaaagttctgaaataaaggaagctttttagagatttacttatatgaatgtatgttgtgtgtgaaactccagggaggtcagatcctttggagatggagttataggcatttgtgagtcatgtgatgtgttgctaggagcctggcttcagttctctcatagaaaggaagtgctcttagccactgaagcatcccactccagcccatccaccccagcccagcccaccccagcccatccaaccctcactccatctcttcagttcctccatcaggattctgttttgtatttttccttagaggagtcctacaccttttcctacttgattcactaaaagtttctggctgaggaagtcaaaccaggcagactagaaatgacaggctccccccaccccaccccatcaaatccagggccccagtgggtagccagtgctttactcctgagccacgagacacagccacaggatactacacaattcacagtgcattgcttaggcctgtttctttttgaccccaaggctggcctctaagtttgggaagtggaggctggtattgaactcctgatcctcctgcctatacctcctgggtgcaggcaggagccaccacatctgccctctaggaatcgtatgtaaaagcatttaattttacaaataaacccgtggtttactccatatcctcagagtaatgatagggacattttctggtttgtaatttccctgagtctagactggtagcaaacaccgggtctgcctccctggttagtgagggaagaaacacactgttaagtacccaagtggtgtgcacaactgtgattcaagggctccctaagcaagaagcaggctgagctctgagtgtgaagcagtctggtctgagatagtggttttaggtcagccagggatgtcataagggacttaatggtgtgctttttctcctgttcttcctcccaagtgctgaatagtaggcttgagttaccatgcctgtttttatgtggggctggggattgaacccacaaccttatgcatggtggacaagcactttaccagttgactacaaacccatcctttgttgaggcttggtctgtctgacctggaactcccactccatactaggttgacgtggagctcacaaagatctgcctgcttctgcctgtttcgagttaggattaaaactgccaccaagcccagcttttttttctttttctttttttaagagaagaagtgctaggtgtggtgggatattagagaggcaagagcatcggaagttcaaggtcacgggcacatagtgggtttagagccagcccggggctacaagaaacctatctccaaaagaagaggcgtgtggtgggagtaaggtggcatctcgctctggtttcggcttacattttctggctagcactgagtatcttctgtgctgctcggccactgtagcactgagtactattaaacccttatgagacatagacttttatatattttctgttactcggtggcttgtcattgctgttttcctaataaagtgtttggagacacaaaagagaattttagttttattttcaatgttaggacttagaattagaccctactacctgtgtatggtggcttatacctactgattcaaaattcaaggctgtggcagaattgcttccatttcaaggtcagagtaagaaaactgggctacagagtaagaccctgtttcaaaaaagcaactaagcaagtggccccccaaaaacaggtgtcccccgtctgctctcatgactgtcagtgcagggacagtcattctgggcacttttgctttttgcccagaggctgagattgctgatgggtaggttggttggtttgggttttttgttttttgagacagggtttctctgtatagctctggctgtcctcaaactcacagagacccgcctgcctctgtctctcgagtgctgggattaaagccaagtgttacctgcctggccttcatttactgtttttttttttttttttaagtgttctacccagtgttttaaatgttggaaacgtcctgtggccacttatgatgaacaggccaagccatactgtccaggtctcctgcccgctgcttctttcagtaggactgaagtgtaactcaacattttaacatttcctactacatttttatgtgagagacagtacagtttctgggtgagatctggaaaatacaggttcacctgttttccaaacagtaaatcctttagccctgagtcacctctctagcaccaagatttatttatttatatttatttgtatatttatgtatgtctgattatgtatgtagaggaaatcagatccccaggaggggaactgaactcaggccctctggagcaagcaacagtgcacatttgtatccactgagccacctccagctcctgaagtgtgtaaatacagaggttacagccgcgcatctctgcagagacagggactgagagttcaaggcctgtctggagctccgtagtgagaccacatcaatcagtgtgacacttagtaggtgctcagaaagcatttgtcaagcatttgtctcgcatcatgaacctgtttcctgtccctccagcgtgtttccagcacaggccactcaggatgggtttctctgtaccagctttgcgctggccccaggcctctcactcagttcatggactttggtgctggtggtcactgttgtagccctggctccagtgccacccgatgctctagaaggacttggtggcaagtgaaagggagtcagggcgagtctgtgagagcctgagtgctccctcttgctagagtatgctgatgccttctcactagtgaccttcaaggtaaggaagggaccgaagattcaaacaggaacattatggatctgttaaaatgctgattatgatcaaaagtatgaattgtagcacagtttcagagtcatcatgcccactgaagtcagacgcgtgctgcctctatggggggacaggtctgtgggctgttgacaagtgggaggtttccctcctcccaatttaggattcaagatggattttaactttcaaactcagtagagcacagcgtatgttcagtgtatgaaacctgtgatcctgcgtgtctcaagtgaatgcaatagtgccttgtttgatccttaagctccagtcgtgaaggtaaaataatggataaacataaggaagactacaagcagctgtggacatcatttctagttcagctgatgtcccatgtttcagtgttttcaggcttgtctttgggactcagacatgctgcctatcttccctgagtttgtttttagttaaggttaaagcttgcctggaactcatggcaatcctcctgcctcagaatctagagtgatgtaccttaccatgcctagcccaaagtttgcctcacaagacaatatttgcttaggatctggagttccctgttgtgcttcttggaaggagaatgaagaaccaagcctgttatgaggttgcatgcccgtgtgggaagctaatcctttattgaatctagtgccccatgccctatattaatatgagcacaaggtaggaagagttccatttcactgcagcaaggccagggcccatcatggttttatctgcagggcctgctggatcccctcactgcaaggttctgtcctgggctaccagtgtgagcctgtgataagtgggagggagtcaaatgttgcctcggtgtttgtttgcctttgttttgctgttgagctgttgagcctggcttcttttcactctggtttaaagcattaggaatcttaagatttgtaggaattagaatatttggatttgtttgaatttcacttgacactgggaagattaactcgaggttaagagctactttggggtcaaactaatttgtttccttagtaattactttattatagaaaacttcaaagcttcaataaagtcagtagcatagtccagcatgtgactagggaccttatcatgaaataaagtagaggggtcagaagagccccccctctgccccagcagaaaacagaacaccagtctggggcctgcgcatctgtaatctggactttggaagctttgagtggttgacttcatatggcctgcccactcaggtacttatctgtgaaaaaggatgacagacagtgagatatctattgtgtgtggacgcttgaagtccggcaccagttcagacaaatgtccccttcctgtccctatgccccagctaccgtacacaaagggacgagggatggatgggtgagtgggagggagcttcctgcctatggattagaatctacagtgggtggtacatgcaaggcctggagctcctgatgtcagtaaaattcccccaccccagtccttgcagtgtagagcttcagcaggggccatgtctcccaggctgtggcagacctgaagggaggcgctgctctaagtacacacagcacctgggtgctggcaagcccttggccttttttctgagaagctgttgctaatttctgcggtgcttaatttacagtagcctagggtagggccaagtctgtgcttgtataggaaaagcctgccaaagcacctgctaccctggctcccgcccttggggtttatgttcaagatccttgccccgtggctaccagttaaacacagatctaattttagtgttcttagctctgttaacctattagtgttaattaagacagtaaagcaggtggcatggtcagagctgatgggtcaggtttgaattgaaagttggaaaacggacttttcattggattgtgacgcttgccagaagattgttgatgtaagctgttatcagtcatggaacattctggagtgaatcatgtttgattaggttttaacacgttgccattcttgttctgttgcaacaatattttttaaaccattaagtcaacttttaagagtggtaaaggaaaatgacactaatttattcataatcatctctgttgccctgttaatttctgttttctatgaacacaggtacttcagaaggcttgtgaggcaaagaaggggagcaagcgcggcagggctcggtttctatagaatactacagtcggtctgtctgtctgtccgcctgcctctccctctcccctaaagctctccccttagctccagatcctttagcctctgcctccaaaacagcttctgctgtagtctttctcttctggcatagctgtttctcttttgtaattataaacatggcatctgcatagaagctggctcctggtaaggacttggaaaccataaagaaagcactgtctttactttatgtaaaatgtgtgatcctttgatgtcagatctacttaatttcattcctactattgagaaagttgagaataaatggtgtggcattctggggttagtttaatgtggaagtataacagtttctctgcctccaactccctgcagctgggcggacagggtgggtgcgccatcataactagccttgcaggaagtgggcattctgtgttggtcacccggcctttaattccccagaacatctccagttcacatgctccttctgcctccatctcctgtctgtgttaaggcatgagccactgtgaccgaacatgcttgagactgtcgtagtcttccctgtgtctctcagtgacctggatgttttgattgctttctgtggactgttcacttttagtcaccttgaagtaacaaagaaaccacttagcccacgccttttcaaagagtcttacatggtgcgagaacctgccttgtttatccctaggttgccttgtggcctctctgttccttgtcattctaccttcctgatgcctgcttgctatgagacctgccatgagtgtttgcatctgtcacccaggggattgcaggtgccttaaacctggcagcccagcagccaagaagttacagagaatttcccaccaggatttcctcctctgacttgcatggggtagagcggccacagaatctcataggtctccgttcaatcccctactcttgtgtctccgtcgatgagactgagccagatgttaaggcagtgcaatgctctagtcgctggatttgagccttttcactagaaagaagtctaaactaggaaaagcagaagcagatgtgatgcaacagcatgtagaagtgctggtgctggcttgctgtgacgtctactaagccctgacttcgtgaggcagagcccacacagccctgtgctgtccatccaaccccatttcctgtgcagataaaggggctttgaagtgagaggagcagaactgcctaacttgtctggaaatgagtgaaatgagtcttccaacacacttcctggctagctctttaagagtcctgatggcagccaggcgtggtggcgcacgcctttaatcccagcactcgggaggcagagacaggcggatttctgagttcgaggccagcctggtctacaaagtgagctccaggacagccagggctatacagagaaaccctgtctcaaaaaaccaaaaaaaaaaaaaaaaagaaaaaaaaaagaaaaaagaaaaaagagtctgatggctggagggccacatagtgtcttcagctccactctgtcactgccttgtgtccagatacttgggaggtattttccagggcaaggactgattgcttttgtgtctttgtcccccttcaggaacttggcagtccatcatcagtgacagtggggtgatggtggtgatatcagatggttgtgggtaaggcagagggctttggtatgaacagaaacagcacactggacatacctgtttctagaattcagtcttcagtgaacaagtagaagaaaagcttggcaggtgagaacacactgaagacggaaagtgaacccgtaggacacagcgttaaacaggctagccactgtccagctcttggggcagctgcagtgcctgggcattggttgctgggagagcctggttatacagagagaggtaaattgggtaggaaggacatccgggtgcctgaagaggagggtgctaaaatcattcacataggggttatttcaggtcaactcctgactgcagcttcccctccccctcagtagccattagttacttttggaataaaaaacaatattttcagagctagcataatggctcaaaggtgcttgccttccatatgtataacaatgtaaccaaagataatttttttaaaaaggccaataatctgctgtgaaatttggggaacaaaacaaagcatgaactcttagataacacacattgatatttttatgctttttggctttttattttggtatgcaaatttaagaattttttctcttaaaattttgtgtatgcaacatgtggatggcatataattggcccatctgtcgcctccatcatatattaatttgtggtggaaacagtaaaaaccatctatgtttgagatagtccattaactgtcatctgccatcattacacacgtagttatcacacaatgtatgtgtgtaattttccagaactgtagttgtagttaagcttttgtctcatgtatgattgtgctcctcaaagtatcaaaggctattttcctctcttggtttatcagccgccctgtccagctttccattccctctgaggagtccaggatcccatctctacagaaccttagaggtcaactttgagcttctctgtgtgcgggatagcgtggtagtatctcctctttgtgagattgtttacatgggaatgaccgcgtctcccatctataggttgtcccaagagtgaacagcataatacattacccacgtcaaggaactcctgctgggacagcatgtcatttggatcctttccaaccctcctgctattacataagagtccacaggcccattctgctgatttatgttaaataatgtcacagcagagacagtgtgtgccatgggctccgcccaaagattccattcagccatttagagaaaactaaagattctttcagccttgctgagtattggtttcaatgttagcagtttgttcctaaggctataagtagtcttgcaggtgaaggggaaggtgtgtaaaccttgtcaaacccaccattaggttagctttgggggctttgagggcacagagagggagctcacagaccaagtcacagggttatttatctgatagactgtactgagggcctaaggagcaggctcatctctgtgtgtatcaggggggacagcaggtgccacgatcagttttctgtttttttccaaattcagtctgtatattttcggtggatttttttcttctatttttttcttctactttgataaatcatcctccccccccccagtccactattaaagtaaatctacttctaatttgagtttgaattctagactgtatgcatatatgcatgtatgcatgtatgtatgtgtgtatttttgtgacatgatctcatatatctcagactggccttaatctcattgtgtagccaaggatagccatgtactttattatatgtgtgtgtatccaagtcaatgtcatgcttgcatgggtatccacagaggccagaagagggtgttagatcccttggagctgagccttctgatgtaggtgatgggaactgaatgtgggtcctctataagagcagcgattgctccagagtactgagccgttcctccagctgggaggatgacctttaatcctggccctcttgcctcacctcccctatgctgccaccaagcccagtttacatcctgtggatggaactcagggcctcataaaaatgctaccaattaacttatttaagtctaccaattaacttatgttcctggtatcaactcccttctagggggcgtggggcaaggtgagacagggtttctctgtgtagctctgattgtcctgaaacactgtctgtagaccagactgccctcgaattgacagagatcgcctgcttctgtctcctgaatgctgggactaaagtcctgcactaccacccctggcttgtgtcactgtcttttaacattaatttttaatcagcttgtgtatacaaacacagatgtaccatgccacaggcgcagaggtcagaagacaattgttcctttattgtacggattccagggattggactcaggtcattagcctgggcagtgagttcatctcactggcttggtttgtttgctacaaagcccaggctggtctagaacattctactctcctgcctttacttcttttaccagtgaactatttttctttttcatcaacaaattgtctaaagaattttgttataagaatggaaagctggagctgggcatggtggcacacgcctttaatcccagcacttgggaggcagaggcaggcccatttctgagttcgaggccagcctggtctacagagtgagttccaggacagccagggctatacagagaaaccttgtctcgaaaaacaaacaaaaacaaaaacaagcaaaaagaatagaaagctgactgacaagctaagctgaccccagggtgaggttttgtcaggttccttctgttctggtttgttggcacccttctggtggccctgcaactgccagcagaagacctaagtgctctcttggccagtcccctggcactcagatcatccctgaagcacttgtatggaacctcctgtcccttttgtctctgtttcttcagatgtgagatgctatcacaggtctgcaaggctcgctgtcattaatggttttggtcctgtgccaagtatgtagcacttttttagccgccttcctggtacctggaattggccgaagcccggaggggcagagcagctgcagcctgatgtctcacccctgggattctccttcataattccatctctctgccgtgtgttagccttggcagctctccaaactctgtagggttttttcctggctgttcttgctctctgaggagtctctggtctgtcacaggccctcagtcatcactgaagcagaagctgctttctgccagtctttacccagtgagaggacctgcagagagcctcccacagttcagacagctcatagctctgtagagctgcttcagagtcctcatgcaggtcgtcagcatggtccctgtcctgtagagcagaagctgctgggtagccactcacaaacaaacaaacaaacaaacaaacaaaaaacaagcaacctttctttgaagaggagaggagaggaccactgtccatccgtgaggaggagaggaccgctgtccagagcttgttctcccctcagccttgggcagggaggtggaacttggctgcacaggtttgtaagacaagccccctttttgagacagggtctcactctgcagctctggcctggcctaatttaaaaggttaacagagagaggcttcatccacaccagggcccctgggtctcagctgagagtccagcaggacgctgtctgtcttgggaagtcgcagggcatttggtagcctccctggggaccagtagtaatctttcctatggctgtgaaagccccatttactgccccctgagaagcaaagtcacccccatttaagacttgctggtaacatttgagaagttaccagtcctaactaacttcctatttctaccagaaaggtagacctgagttctgagttgttgactggctggctctctgtgggtagtgcacctgctaccctcaatcgggcctgacagctgagaggagatccctggactctgcagactggagcagtcacacactgtgtgtctgggatctgagaacctaccagtctcaaggtgctgtgtgcatgctccgggcagggactggcactgatctgccatctgtctccacctcagtctcatgcatgaaccgatacctgacgctggcccagcgaatcagtgcacagaatgtaaataaatagcattggaattcaagagggatgacaaaaagaagtcagaactagggctaaaattaagaactggaagacaaaggatttggacaggtctgtgcaatgtagagagaggtacaggaagggaggggagaaagtagaacaaacagtggaccttcccacacgctgtgatgctaccagtgtgggttcaggcagatgctgctttctcttattccataggcattttccgggtttccaaattctgctttgatggcaaaggtgttattagtaactcatggctcttttggtggtcctggccccatggagccttgtgggtgccgagtcagagagctgggatgaaaactgtcagcgctgtatagattgatcacttttcatttctgttttgacttgaagcatgcagggttttcttgtatttccaaccactaaggctttccaagctaagcctggtggcacacacctgcaatgccagctctcaggtcacagacacagactgatcagttctctcaagtctgcagtattatgagccagagcccaaggtttggtttggtttggttttgttggctacattggaagttcaaggtcaggctgggttatgaaactgtcttaaaaagcttttaaaaatgatgtgcagcttctgatagatctgagaactgcgtctagacggtgacctgcatttgatttctgagttggctgcggttgttgtgtgattttttttttttagtttggtgtgaacatgactttcctgagttttcagtttgttctataaaattacaaatcctttcacactgtccttatgagagacaaacagatgtctgcctccctccccattgctgggatgctaggtatatattcccaggagggcattgggtttagatcttcatgcttatgcagtaagaatcagaggacagctttcaggagtccattctctttcagccagggattgcgctcagcttcccatgctatgagtcagactttctacccagctctagctggcctggcctcatgtaaaacctggggctaacataggaagttaactgcttcatccataacagggtcctgggtctcagcactgttggtattccgggcaggagggtgtctgtagcccaggttggctttgcgctcgcggtagtcctcctgcggtagccactagaatgctgagattacaggtgtgggacatcatgtcagtgtctggcttttgttgtgatttttgttgttttgttttgagacagttgtcctccgcagccctggctgtcctggagctctctctgtagactgtgtgagtactgctcatgtccgctgatatcccttactgacccaaggggctattgcttttttcactgtgtagctggggagatcatcagtgagcttaaatgacttgccagattgccccattagcttgacgcaaagccagtgtttaggtccgggtgtccttgtggaggccagactcactgtatgcccatattaatgcctttggagtactgttgcttaccacagtggacactcaaatgttgatgagtaaaagctgctaagaaatcagaatagcagctgctgatgtacccagttgaacatgcatggcttagatccttggcactgcatagacttggtccttggtactacacagagttggtatggtggtaatgcttgtaatcccaacaaaagggaggaagagacggaaacagaaattcatcctcacctatatgtcaagtttaaggccagtctagcctgggctacatgacatcctacctaataaattataacagtaataataagaacaataacaacagtaatagtaataataataggatacaaaaagcaatttctcagaggctagatccaggtcctttgaagagcagttaacggcttctaacctctgagccttttagccccaaagtttgcttagtccaaacgttttgtttgtttgtttgtttgtttgtttgggtttagtgatagtgcttgggtttgaacccagggcctcctaggtgctgggtaagcactcttctgtgctgcctcacatcctgactgactgctctgtcactttttctcctgtttgcctgcctgctggcagtggcattgcgaccgtgtgccatggaaaacctggctcgggctcaggactccagtcccatccaccacagaaagctcaaacaggaacaggacacttgtttgtgtaggcagcatttagcttgtcttaagacctggcagtgttggagtaacggggcagatgaagattaacgttcagtttcctatcaggactagcagtttacaaagttctggtaagtgttttaaagggtggaaaagaaagctagaggcaagaggtcattttaaaaatgaaactggttcaagccacacacctttaattccagcactgggaaggcagaagcaggcagatctctggagttcgaggttagcctggtctacatagttcaagacagcttagactgcaactatgcagtgtaaatggagctgggcctagactactgtctaagagaccagtctggtctattcccataatccatttagccatcccagcatttctgaggtagctgtgaggtgggaggggcaagaaagatgaggtgtcctttgttgttgtctctgcctctagcattgctgtttgcatacatagtaagcatggagtcaggttagtctgtccaggagattggaagggctctgtttgggcttccagagttcttttctaccattgtcacagcatcaacggtgctcacagtgaggtagacagacaggtagtggtcaaggctctctgagccttagcagcccctagaataattgctcttgtcctgtttacataaaatagggattatcataaagcctcttttatcaaagttagacaagactgaagtcttttttttattagatattttctttatttacatttcaaatgttatcccctttcctagtttcctctccgaaaatcccctatcccctcccccactgctccccaactcacccacgcctgcttcctggccctggcattcccctatactggggcatagaaccttcacaagaccaagggcctctccttccattgatgaccgactaggccatcctctgctacatatgcagctagagactcgagtcccaccatgtgttttaagactgaagtcttaattaactttcttctttactaagatgtgtgcaggagggaagtctgggaagccctgccacaaccctagcccgctcctgggctcagtgatgctgatgtcgctatgcatgggctgattgtcttcttaaagctagctcttggttggttaccaggcttgtcctttagagagctcccacagcagagggcatacctctgaagccacggctagtgcctgtctaatggccaccgcgagactgctcccatgctcttgggacagtggaggaacaaagggaagggcctcagctctttctgtccatctgtgacgttctagctctgctttgatcctcagctcttcttgtttgcttccttgcttgccctgtgtcagccctggggcaagcatcactaagctggcctctgtctcttctttttcataatgctggaattgaacccagggcttcatacacaagaaacaggcaccgagctccgcccccagctctgactttcatcttggttagtttatgtcccttgtctgtaactcatgggtgtgcttggatggctggaatgggctgacaagactgtctagagctggacattcgtcctgtcttggagcggagttagcacagcctcagctaatagcctaacttcatctctgcgtgtgttgccgctcccagcgtcaggctcccagcgtcagtaaaatgcagatacattctaatccccacagggagctttggtgtcttgctgggaacatcattgtcttgagtgtgtttgttctaactgcaaattagcaagatgcttctagaaagcttgtttagaggggtgtctggggtaggatgttgtagttggaacacacaccattctgttgtttttgttgaaataggcttctgctgtgtagtccaggctggtctttagcgtgtcagcgcctgcgtcagcccttgagtattaggattgcaggtgtgaaaacaccggcacatgtttgtgttataatccctaaagggcttggcatttgcccttcagtagacgaccattctgtgggagggctccagaggtatgcagtgtatgtatgggactgggtttgagttagagcatagtagtactatagtagtttgagttagagcatagtagactaaggctctggatgggcctgtgggtgtttgaattcaggaatgacttgggatagcctcgagacagcctaaaacatgaggggttacctaaccttcagtgatcttccaggctacagaatggagcccacagctgccaactcctgacattgagctaagaggctcagctgacctgcctgcctgcctccatttattctgtataggtgttttgtgtgcatgtatgtctgtgtaccatgtgagcctctggtacccaaagaccagcagagggtgttggatcctctggaactgaagttatagatggttaagaaccttgtgggtgctggcaaccaaacctcagacctttggaagagcagccagtgctcttaacttctgcatcatctctccagatctagcttttaaagatgagtcaggagggaaagacaaggcaagaagagaaactaaacatcaagtaaccatgtgttatacgtgtttgcatgtgctcggatatgtatggaggtcagcttcaggttccttagttgccacccaccttatgttttgagacagggtttctcaccagcctggcctggagtttcccaggtaggctaagttggctgttgaaggaactgttgtctctgcttccctggctctaggttgaggtgcacaccagtacccagctttttaatgtgagtactggatactgaagtcaggagtttcatgttttcctagccctttagccccatttctattattttaatttctggggagctttttttttacattaatttatttattgtgcatgaggctcgacttttggctactttgtgggtacccttttctaccacccttctccaccctattccaacccccagcactaagtaggagagaaagaagggtagagggaaaagggggtgtggagacctttagacttcttcctgctgattaggggcggcaagttccttggggcaagcttgatctttgccagtaggatacccatttcttctcatttctttgtgcataacaacttgatctatggcagccagaagcaggaggagcagctgcagccctctctgggctctacatgcgtttatataacctttcaagagtcttcaaaattccagatgtttcacttgcagaaactatctgcagctggcaaaatcatgcccctgtgagagcatgaggcacatcacagtcagctgctgtggacaacctgaagccccacatcccacatctggggttagaacaaaaacattcctcgaaccgtgcacatgccatggtatgcttatggaagtgagaggacaacttgtaggaattggttccctcctgctgtatgggttctggggatcaaacactgtttaccaggcttgatgacatgttcctttacctgcggagttatcttgccagcctcgatggtgttttgatacagggtttcatgtagcccaggctggccttgatgctaaccttgaactcttaaacttcctgccgctgcctgccatggatgggatcgccagcaagtacccctagactcagttcagcatgtagagttttaatcttcagacaggaaaagaaactaaacaaagcaagacaggtttccggcatgcccaggccctggtgctctgatcttttggcacagcacaggtcagaaatgcaaatccagaatcctaagaggctttgagcacccagagatgctgttgtcaggcaagatgggaaatgctaattggcctctgagtgagcagggctgctgctgagctccatcccttgataaatacactccccctggcagtcttgttaatatttaaaaataaagtgccaaatctattacagccactgtaatttaatttttgctgcatttctgagcgatacggttgccagcatgtccgtgtgggcgaggcttcaactgtcaccctattcgtttatccgttcagttacttgtttgtttgttcccttccttatttgcaattgctgtgcgagaatgaccttgagagtaactggaatattaactgggaatgagtaatttgtgtttgggtatgcctacaaaggtgactttggctgtccctcctccccatcctagtctgcttccagaaccttctgaaagaccagggtacagcagggcattgaggtcatgacccttacagagctgcttacagagtgttgtgacaggccttggagtggcaagaactgaaatggtcaaggctctccctttccactcgggtgtgtggtgtgtgtggtgtgtgtggtgtgtgtggtgtgtgtggtgtgtgtggtgtgtggtgtgtgtgtacaggatcccatgggctggccttgaaggtcttgctccagagccagcgatggatgatctcgagctctcagtcttcctgcctccacttgtgaactcggaactcgcaggcatgcaccacagtgcctaaaggcttcatggactctcttctaagtcgtggacctaagattgatgttacctttagtcatgcatctatgtttgtgtgtgtcatgtgtgtgagtgtacccctggaggccagaggtgttagaatctctggagctggagttacaggtgtttgagagccctctgaaatgagtgcaggggattgaacttgggtccttctgtaagagtaatacatgctctgaatccctaagccatccctccagcccaagaaatggcatggcagattctataaaccaaataatagcttgggggacatgacatagtcactggatgccttaacctcttacatagccaactggggcctatatatacccctgaatcatgatccttaattcctttacaggatccttagtttaagtatattttgacttaggtttatttggcaatttagatatatctaaaatcaaacttctcctgcaactgtgttttgagacagggtctcactatgtggacctggatgtcctggaactcacagcgatcctcttggctctgcctcccaagtactaggattaaaagcaagcaccaactacatctgtcacctctcagctctgtcaggcgggcattcttctgtcagatcccaggagaggcgtgccatccatcttgggcagtctgtcttctgtacgctctgcattgctgtctgggactacaggcaaacattagctgcagcctcttgtctagattggagggaagccatcaccttcagactgctctggaaagccttgtgtgtatgcctcaggctgggcagtttctggtgtgttctctggacctttggctattctgatgaaaacttgcctctgatctcaaatgtttggcaagttgggtgttagtataaactgggatgatgccatcttagaaactgaaattctcaaagaacagataaccccattaatctgttaggatcctccaggctaacagtaatacgattatagaatcatcctcactagacacagatagggacgggtggccttctgaaagaggtcagtgcagaagctgagtgaagaggatgcttggaaccttaatgggaagctgatgcaggaagagacaagtttaaggccagcctgggttgcagggggatgtatcacctaagagaaataataaatttatttgacttggtctgtaggccagaggacagaaaaattggtgaaagttggcacagaagcctttattatacagcagctttccatagggttgggaaaatgttttattgtaacagagagagaaagaaaataaattacaaacaaaaaacaactctcttagtagcctggtgaggtggcacattcctttaatccccacagtgaagacaaaggcagggagagctctgtgagtctgaggctagccaggtctaaatagagagttccaggcaatccaaatctccatagtgagaccctgcctaagaaaggaaaggaaaggaaaggaaaggaaaggaaaggaaaggaaaggaaaggaaaggaaaggaaaggaaagatggatggatagatttccttatctttcctctataaaggtgcagtgacctgtgcagcagagaccagcatgctgcagagcatctttgactccgaactccctctaccagtctcgtttgtatagaagttgcattttaattttaaattacatttgtcattttgtttgtgtgttcttgtatctgaggatgtgtggctaccatggcacatacatgaaggtcatgtgggtcccagagacacagctcggtggcaggctggcagcaaacagcctcacacactgagccatctcaccggccccgcgccggtgtttaagctgtccaggatgaatgtgctgggctgccgagtcacctcagcctagacttctctgtgcctgcaccagttcccttaggaagttttgttttgttttgttttgttttgttttgttttgttttgttttgttttgagacagggtcccacacagtagccttaactttctggtacatcccaagtgccaagactactctcgtctgctatttatgtggtgaaattgcggctctccagacagggatgctagaacctttgtcattactgagttacggttttttggttttgttttttggtttttcgagacagggtctctctgtacagccctggctgtcctgaaactcactttgtagaccaggctggcctcaaactcagaaatccgcttgcctctgcctcccgagtgctgggattaaaggcgtgcgccacctccgaccggcgagttacaatttttatagatggttctggttctgggaagctcttctgggcttcaggacaaggaggatgacttgaaggggtcacttgagaatgtggcatcccttgttggcttttgtaaagctgaggtcattcaggtctggcagtggcagtgcccatcgcagcacacgtgcaatgtggcaggctgcaacttactcacgggcaagcaagatgcctctgcgcgaagcaggcagggtcagggtcggtctgtcagctgggaaggtcagagacaggagtgagcagatccagccatgggatggaagggcatccggaaaggtaaggacatttgaacaggcagcagcaggagcccgataccacaggacagaccaaggctgtgggagagagagagagagagtggacaagaaaccagacacacagagccttgcaggtgactgcacctcccacagtatcttttcctatttatttccagggcaccatgggtgctgaccaacacacgtgtggtgctaacagtatctgagggctgtgtgcagtttcttctggcccagggttccagggcgtgtggtgtgaggcttgagcatctctgctgaactgtctgtggggatgttcctggtatggagacttgtgaggcttggtcagtgtcatgctgttccgaattaaacattcttagttgcagttagaatttatattcctacctatatagatgtgcagagaacttgttctcataaacagcgtgggcaagcatgggagctgtggcttacctgcctgtcctgcgctgcccatgagctgggttcagatatgctcacatctaatcaggtgccatttaataaaagattggcagctgggcagtggtggcgcacacctataatcccagcacttgggaggcagaggcaggtggatttctgagttcgaggccagcctggtctacaaagtgagttccaggacagccagggctacacagagaaaccctgtcttgaaaaacataaataaataaataaataaataaataaataaatgaatgattggcaagtttgtaggattgtttgcaagacactgcatagctgttaattattttattttctaatatttggaaataagttgactggaaacaacctgcgataaactaagtggcttttgtgtctgggatcagaaggccttggggagcaacaggcagtttctccccagttagcttgaaatgaaagcctgtgttcgccctttggcctgtgtgattccacttccagtttccttaaacactttctgttgctccaaagcatttaaaggatgtgataatgtgtgcgtgcaaattctgcagccaaaagtctccttgcattttagaggaaagagatgtagctttttatttttgctttctagaaatcaatctttttcttggtttgtttacctgtttttgatatggggtctcactatgtaaccttaggtggccttcctctgcctcccgagagctgggattaaaggtatggattaccaggaatggctttaaaacaaacaaaaacaaaacaaaccagggtcccatgtagcccaggctagcctcaaacacttataaagatgatgacacccttgaattcccaatcctcttgactcaggtctctgctgagattacagccctgaaccaccacacttgctttttataactttttttttttttaaagatttatttgttggggctggagggatggctcagcagttaaaagcactgactcctttttcggaggatctgagttcaattcccagcaaccacatagtcgctcacaaccatctgtaatgggatccgatgccctcttttggtgtgtctgaagacagctacagtgtactcatatactaaaataagtgtctgtgtttgagtgcaggtgtgcctgtgtgtgctcccctgtgcccgtgtgtgcccgtgtgtgctcccctgtgcccgtgtgtgcccgtgtgtgcccgtgtgtgctcccctgtgcccgtgtgtgcccgtgtgtgctcccctgtgcccatgtgtgcccgtgtgtgctcccctgtgcctctgaagcagattcttctccagggacctagagtttgagtttcctcagctagactcaaagccagcaagccccagggatcccctgtctatgcacaccttggagctggagtgccaggttcattgcgtggatgctgggatctgaattctggttcttatgattgttcagtgaatgctaactcctgagccatctttctctagctttatagcttctgtttaaaaagaaactcatgtttgtcataacctgtcgctatgctgtctcagtgtgtgcagtgaggaaatttgaaatgtttaagtcgatgactctcatttgagcatcaagtttttaaaactgtaaatctctgaaggtgctcggaatggctcctggcatattgtgttggtgcctggcactgaagaatactgggaatcagttgagcatgtgaccctgacagtaaaaagatcatatcagagaataacacgaggatggtttggggcacttgggaaactggactgcagagacagcccagctgtgaaacctggctttgccaggtcagatgacctaggcagacctctgttcctgcttctgtgactcaaaggcaacaaatagcctgcaagtcagtgacctcagaggtctcacacacaggcgttaggaaactcagcagtgcggcaggaagcaggaagtacactgaccccataggaagccaggagaagcagaatcagtgagttcgtcttccctgacagccgagggagagctgggactctgtaacctctggtgcttagggtgggattcagttattcagaaacacagctgatgttagtcatagatgtcagagcactttgaaagtattccacacactggtgacacattactgtctttcgacatgtgagccttggtcctctgtgatacccatgtgacagagacatcaccccgggtgccttccagagtgtaggtcttgaagatcaaacaggttacagatttttaacccatttacccatcacacagaccaagactgagccttattgctgcgaggaccaggttgaactgcagaacattgtcttgcttctgcaggaatggtcagaactcactgtgcagtacaggctcttcctgtcgcagctttgcaggaaggagcaggtcccagggttggctttggatggaaccttggtgttttgcagggtggggatttatttgttctgagtattgattagttggcccgctgaggtctagtcctggacacttccttcaaggccatggctttcagcatggtgctcacacccgagacagctcccactgtgctgtgccttgctccctaggcacactaaccagtgcacaggtctacagtaaagactcctgcctgggtttgctcttgatctctctttgcctcttggcttcattatgtcccgttattttcttcccaatctggtagttttgttagggatttttttttctgtgtgtgcaagagacaactgcaggtggattagaactcaggaggaaagaggagacgccagctctgtgcctggaaatgctccgagtaagccacagcttcgaggaagagtttatttttcttatctgtgtcatggttataagagattcctcagtgtaggcatggggccgggtaataattagtgtcatccatcagcaagactgatctgtgcaaagtgtcactttagcatcccacactggacagccttccttaactgatgcctgctctgtgctgtctcagcctcccccaaccccatgctttctcccgcttctacaagagaaggctaaagtctgtgggaggcatttgctgactgggctgggcacctcacagttggctttcaagctaaaattggcttttaactgcagttcaaccagcgttgatcagaaccacggtggtgggaagtactgcttgtcagtgtaaagtcactctatgtcctggagcactgggctttgtagttccgagattctgacttcactaaccacatggctaacactctaaaagtcatttgaaacaaaacgtgttcactggtatggaaagagggttaagacaatatcttctcataaagtcggtgggcgacgtaggggttcagactggaggtccgtgtgtctgcttggacattggcttgtttgtttgtttgtttgtttgtttgtttgtttttcgagacagggtttctctgtatagcccttgctgtcctggaactcactctgtagaccaggctggcctcgaactcagaaatccgcttgcctctgcctcccaagtgctgggactaaaggtgtgcgccccacatctggctggacattggcttgcatgactaagtttagtcatgacttaaaagtttctgtatgcagttcatcttggtgacttgtgcatataacagaagggtgcgatacttatagggtcctgtacaatctgtcactgccagtcacttggtgtttgacaggagggcacttagcagcttctctaataatattaaggggattttgcctccagcaagcttagtatgaattagtaatacactatgtatggctgctctctacccatagttagcaggtctctagtgactctagccaaggactggtgggtttattaccagaaataccctaaacagattttctgccagctgattctgtagagagtctgttgatgtttctggtgacatggcagggccaggtgctggtttggggagtagcaggagccttgagctgtctgctgtggagccttctgatggggggcggggctgcagttggcagtttttgggtagcagatgaacagcttgctctttgcacctggactgtcagcatgggcatcagtgttgtcattgtggacagctgaggctgtccttagcacagccgagttggaggttaagacaatgtaggagggacacacatggaagtggggttgtctggaggggctgggaaagttgagtaaaaaattttgtcgaacatcactggggaacattttggacccagtccaaagtggaattttctttgcagatggcagtgtactgcagattgcctgagttcttggaaatcattctttctgcatggtgtttgttagatggtgctggtcctaggcaggctgagtctggatctgtgactgtttctctttgtttggcaatatttgccttcttgttcttttatttttttcagggttaggcatattcctgtggttaaacagaagagctttagtgagtgtgtgtatacatgaacttcttagtcaaatgataggactcattcaggagacagtattcacaaactattagtataacacgttgcaagacaattgaaatttttagtgaaatgtattacttatgagggatggaagttctcaagagtcaggtcgcctacaacctgaatccaggcgtcagacgcaggtggtcaagattcaccaaagcacctttatccagagagtcagcttgaccccaaagccaggcctaaaaggggaccctgaactgcagaggagtccaaggtcagcggggcaccagctaacaagcacacacacagctaacaagcacacacacagctaacaagcacacacacagctaacaagcacacacacatccacttcttgctctcctagctgtctcacactctgacctccttacagcgatggactgtaatgtaagcaggcagggcttgtacgcaaagcgaagcctttctaccctagctgttttttttgtcagggtggtttctatcacaacgacagaatagggaggctggcattggtttcctcgagaactctgtgctgactgcatttgaaggtttcttgagatttatatgtcagagaggagaccaccatggatcacttgtagcagtagtgaatcagctaagtctagaaagctccatctagttttgtgtaggacgggaacactgtctggctcgtcctgataactgtttcatggaagccacagggttcccttgtgacagcacaacagcagggctttcatgtaagagaaaaataaaaaacaaaaaggaaaaggaaaaacaaaacaactgtagttggggagggtggcacacacctaaaatctcagtgttagggctggggctggagggttgtgagtttaaggccagcctgaactacacagccagtttaaggtcagcctgagtttttagggagaccctgtctcaaaagaaccaaaaagcagggctgtctggggagatgctccctggataaagcaccttgttgcaagagtgaggaccttaattcagcacccgcataaaggctgggtgtggttggtgtggccctgaaatcccagcactcagctggcagagaccggaattgatctcccagagctcactggctggccagccgacacaactgctgagcaccgggttcagttagagtccttgtccttaaaaataaggtggcgagagatgggaggtgaagacatgacgcttcctccacagacgcactacttatcccttacaaatccaaaccaaacagagagctctgagtggtagagccagtaggagccgcggtttatcctacctctcccagttgctgctgagggtgctcggaagtcactgcagtgtggatgaaggtctccttagaaagatcaagagagacaacaaaggcacaataactgtgcaccttgtagcactgtgtctccctccaggtgtgcccttgggctagccaccttagtgttatcagtgagcttgatacaggttctaggtccaaccctgactgctccagttcatgtccctggggggcagatgcatgatcctggctttctgagccctccttgaggaaggctacaccaggggagcacctctgttggaagaacctttgcagctcacgggtggggaggattgtctgcagtgcctaggtactctgcttcttccctaaccatgtgactagggccagagagagacctagttggtaaagtgcttccaaagagcctgagttccgttcatggcgcccatgtgaaagagccaagtgtgtgaagccatccatgtgcttgtaaccccagccccgggcaggggagacctgagcgtctttagtactcacgagtcagccagtcttgcttaattggtgagttgcaggccaaagagaagccctgtttgaaaggaggaagatgccgttccgaggataacactcaaggcccgtcctcttgtagccttcatagcagacctgcacatacacgcaccccaccctcatccattgaaggaacagcttgtttctaagatgatttccaacagctggtgtaacagtctgttgaaaatgagaggagactgggttatcctcagaaaaacgccccagaagcaagtgagagatctcctaggaagtttaagtcttgtgtttgatggatgaacggtggcatccatcctcctgccctgcccctgccctgccctacaaggtcatagaaaaggagatgctagtcttgtgcacaggcttctcagagccacatcttagagattctgacgctctccagccactggagaacaagccctggatttgttctggttttgcagagtgcggatgagtgtgtgtgtcttcctgcagagccctcttgcacactgtggcctcagtgctgaagctgttctcagtgtggaccaggctcgggctgagtgcctggggtctccacactgcgatgctttgtcctgagccattccactgccagtgtagcatcagactcacttaggctgagtggagtgacctggtgtcccttcagtccttaccgcctgttctgtgtgaggtatggtgataataacaatgcctgtcaattggatacagcttgttaagccggaattggcagcccaaggccatgtgtgctgagcacagaggagtgccaagacagtaaaccctgtacaacagccagaggccgcgttggaagccagccaagtgttaaagattccacctcagacacttgcagggaagacttgtaagccactcctgtccttgtgacagagactgagtcacgtggagcagctgcccaggaaagaggatattacttctggggtgtggctgcctcctgtaagcctaagtgaggatgttacttctggggtgtggctgcctcctgtaagcctaagtgaggatgttacttctggggtgtggctgcctcctgtaagtctaagtgagcagccacgctatttaccatagtaaccacatttaccacatttaccatttaccacagtacgtcttagcttacttcagttacctgaagagcactcagcctgtgcgtgcctcactgccgtggtgtcggcggatgggcaggacatcttactccaccattctccacagacttcagtgctggggtggggaggggtgggcaagagtggcctgtagcttcattctgagggatgagcagggttaaagtggatgtgtgctgagagcaagcagagccctttgaaagggtttccattggtctatagaggttgttctgattgtcactgtgcttgaaggcactgtgaatgtctgcagatcaggtgggacgtaactgcacttaatgctttcctacaccagcgtggggttgactgagatccccctgagccctacccaagaactgtgagtgtcctgaatcctgtgtgggaaacaggcatgagactgggaaggtgttagagctgagagacgcttgaaaggttcaaaaggagagaaagccccagcgttgtgtggtagtcacctctcttccacccgcttttccacagtgaacacctacctcttcatggtgcaggctcagggcatcctactgcgggacaatgtgaggaccatcggtgcccaggtgtacgagcaggtggtccgcagcgcctatgccaagaggaacagcagcctgaatgactcaggtaagccagacaagagggccctgaggagtgtgcaaccaagacaggcagggaggactcagtcaggagttatcaccacaagaaaagacaggctagtccagaggtcaccccagctctgttcaggatgtgtgaggtgattagaaggctgtatttgctcacttgctttcttccttccttccttccttccttccttccttccttccttccttccttccttcctttctttctttcttgtgtttcagttatttttcaagataggatttctctgtgtgatactgggtttcctggaacttgctctgtagaccagggtggcctctgcctctgagtgctgggatttttattttgaactcaatgttatcttttaaaatatggctttttgtttgttttatttttgagacaacatccctctatgtagaccagactatcttcgaattcacagaaatccacctgcctctgcttctcaagtgctgggggattaaaggtgttcaccattacaccctgctattgtgggggcgtttgggggacctgctcctaacaaaaggtttaataataaagatgcagagacgtctgtacagtataaggctcccagccttttgctgggcagactcagctatagtccaccttcgcccgactgccccgctgctgctgtggcactgccctcttgctctgtcactccaccttcctcctcctttcctgtccctgagcctgtgccctctggcctgctcaatccatctcccccagccttcctccctgcctctgtcccagcccagccaccagctctttattctccagaaagccgtgttctagtctagcccagtcagcaggacaatgcttccgactctttagattgccctttggccttgagggctatgaccttcagcagctggctttttttttttttaagaattatttatttattttatatgagtacactatagctgtcttcaggcacatcagaggagggcatcggatcccattacagatggttgtgagccaccatgtggttgctgggacttgaactcaggacctctggaagagcagttggtgctcttaaccgctgagccatctctccagcccacagcagcttgctttttaacatgataatctcagagaatcatctttgggctggtgaggaaggacaggcctttacacagagagctggtggtggaccacagaggcaagaccaagcagtcgaccagcacttagctctgccaggacttagcccagtacttaacaccgtcatgcagcatgggaggagttcgtcctagtactcagcctcaattttgtggggctggggcagggtatgcgaatgccatggagggagcatggacattgactcgactctctcctcccactaagatgcaaaatcttaagaagaagaagatcacagagggaaattaggttgggaagtacggatgaagggctgagaatgctacaacaggggagccttgctgtccagtgtccccagagtccctcagagctcaagaatggccaatgtcccaaacttttagctaggtatcaggagttcacataatgactttgaggaccaacctggaatacaagatctgggaaagccaaaactgtcaaagcagcctggtacccagagccttgtccccagccttgacgaggacctggagccctgagaacctcccacatgtgaagctgtcccctcgatgagggcgtgtgctctcttatgctctgtgcctgggtgcttcattcaggactgtggttatggccgagggctagaacagatttctctggggaatcttatcttacaagatccagtggaacacctgaagaggacagtagggacgaacactgagccacagtaccctgccaggacacactgccatgcgatctcgtgtctacacctgacagccattctaacaaggagaaacagaccagtgagcattccagaaacagagaacattgagtttccaggcttgaaagatccactgaatggatgggttccataggaagtagattcccagggaggctgaatgttcctgaacagggagcaagctctctgctttcagagagaagcgactgtttgaatggcgccactgttttgagggtctctggcagctgtagagaagtcacctgcagtgtatcgctcaagcaccatgaaccacgtgagaacagacgctctcacatacactaggtttcaaaatcacatatttctccccctccacttttttccatacagggtttctctatgttgtcctggctgtcctggaacttgcattgtagaccaggctggccttggactcagagatcctcctgtctcccaagtgctaagattaaaggcatgtgcctccactatcaggttcctccacctcttttttttttttgcttgttttgttgttttttacttttcttaatgtttattttgtgtatttgagtgtttttgcttgcatgtgtgtctttgcgccatgttcctgctggcatctgaatgaacaaaagaaataaaaaggaaaggaaaggacataactgctcctacgtatggtggaggagaaagtttattatagataggcaagcatagccagaggcagacacatctgggagaatccagagtggctctgaccctgagccatgtggggggaaggggagaggaagaggggagccaagtacagcagccaagaggccaaaggagagtcacactgtgtctgggctatatggggaagagtagctcaggctctgggctgcagagttcagggaagagggcggggtgtgccagccttaccctgtatcaggtagggactgagggatgctgggagaacctggaggccaggtcctctttagtatgtttaataggcacatcagcttcttgtacaaggtttgaaacttaatggcatccatagagagaggcaagaaggggacattggatccctgagactggagttacagatggtgtgagctgtgggtgctgggaactgaatttgagtcttctgtaggagcagccagtgctctaaccattgggctgtctctctattccccctcccccttgggaagccgttggagcaccggcttcatagcgagtgagaagaagctataactttcaaaaatgaggttgagtcttgcatatggggtgaaggctgtcctgaggcactggtgaggggcctggggggtgctgtctcagcaggaagtactcactcttctttgggaggcagtgcagagggcgggaacaacgttgaaccaggagcaattccgtgtaaaaccaaagtagcagaagatgagaatggttccaaaaagaaacaccccagtaccaccttccacacagctcagcaagccatgctcagggcatcttcagatccataccgaacactaactaatgtccagttacagcaaataactgggagactgcaggacacgaaggtgcaaggcatggaggctggggaaaggagccacggtgtggctctcgatgagccagagagcgagcatccttccaggaggtggccagaagcaggctgttgagcttccctgtgaatgagtgcaggcgccaaggctgctgctccggggttggcagtgctgagtcccaccagctgtaaactgagtaccagaagcccggggtgccaatttaagcgggaaggaagccattgcagccgtctcctctgcttccttcttgtggatggcttcgtagttttagctccagtgctgaaccacctgctcccaccagttacagagcgcttctgaggggctggaggaaccagcacaccagtgcccatctgcgctacctttctcttccctccctagattatcctctggacttgaaccacagtgaagcctttcccccaaccacgacctttcttcctgaagatttcacctactttgccaaccacccttgcccagagaggctcccttccatgagtaagtagctccaacttgcctcctcagctcccagcaggtttctgttaccctgggagggagagagtgacctgcctctttggataatgaaatggctccctgttctgggagtcagagctgtaagaattccttatgactcagcccctctttgctaagcccgttgctgctgccccatatgcttggtggtgctgtgttctgtcccgtgtaatgacccttataacatgtcctaaggaaagatctgggcattgactgtgtcactgcagcaccactggtactaagagtaagaggtttgatgcaggagccctctgtccccacctccctcctgtcactcttgttttcacttgttctggcccaccaggctcacccctcacttccctcccaccatgcttacgactgatagttgctacaagttcttttctctttcttagtattttacttagatttccattctctgtgtacacgtgttctgccttcatgtgtgtctgtgcaccgcccgtgatggagcttgaggtgataagcctccatatgggtgctgggaactgaacttgggtcctttgcaacaagcgcttttagccactgagccagccatccagccctagaagctattttctaaaaaaaatactggttttttaaaaaaaattagggctgggggctggtgagatggctcagtgggtaagagtacccgactgctcttccaaaggtcccggagttcaaatcccagcaactacatggtggctcacaacaatccgtaacgagatctgatgccctcttctggtgtgtctgaagacagctaaataaataaataagggctggagagatggctcagtggtcaggagcactgactactcttccaggagtcctgggttcaattcccagcaaccacatggtggctcacaaccatctgtaatgggatccaatgccctcttctagtgtctgaagacagcaatagtgtacttacattaaaaaaataataataataaatcttttttaaaaaagattaaagccatgcctttaatctcagtgatagtattcctagctatcttggaattcaccgtgtagagcaggctggcctggaactcacaaagatcctcctgcctctacttcccaagtgctgggattaaagcccccgcacctggcgtccctagcactgattgtcatagtgtcgtggttttggggctttgagtgtggccaccttaagtcagaatccccactcatggtggaggaggagaggccggcagccgactgtgctgccgatggagctgacgagccaaatgtgctgcctcgcttcctctgatgaattcagctgccacttaggaggctttccagagggccagcagtttattgagaagtgaaataggagctcccagcagcagggaggggtcttgagaaagagctgcctctttcagtttcaaagtcttcgtttctttctccacctcggcagaagcaggtctccaaggtgttgtcccttcggtatgcttccttgccagatggtagtgacacactaaagagcgatgagctggctgttgggaaacgctaattgtttctcctcccgctgcagagggcccgatagatataaacatgagtgagatcgcaatggacgatattcatgagctgttctccagagacccggccattaagctcggagggcactggaagcctgcagactgtgtgcctcggtggaaggtgggtatgagtcagacccgggtgctgggaacccatctgggattgccggggtgcgagaactatgacgtcagggagcttgcaccctacctctcattcttgagaaatggtttccccccaggactgctgtagccatagacattggcaacaccctgatgctgtctaggggcactgaacacctttgttcccaggcaggcttatttgcaggagggagggccagtaggtcagctgacacaattgtggactgtgcatctgcagagcagggcttcctgcctggcctcccagcttcctgcctggcctcccagcttcctagaggatacgtggactgcaatgcaggtctctagctagacgcttaggcctctgcaggatggctgtatcgggaaagagacagcagcttatggctgttttatgagcaagtgtttaataaagcgcttgtgcattgctggccctgtgaagggagggaagtgtcttgacacgagccagggataagcttagtgcagtggcagcagtgtccccagatgcagtgtggagtgagctgtgtgcagctttggagagctttgagccttgatgtttgcacacctctggagggactttggtgctgggtcaccatggatctgtggaactcctagagctgcattctggacaggatccaggtatctccagggtggccttgcctgcacaggtcagcgttaaaggatgcctggggcaagaagaggagcctcgtagcattccccaagggttgcacatccaggagtacacaactttgtagtgatgcagagaacttgctggtaagctggagccagcagccagctgatggctcccttccctgtgatctgcaggtggctatcctcatccccttccggaaccgccatgagcacctcccggtcctcctgagacacctgctccccatgcttcagcgccagcgcctgcagttcgccttctatgtgatcgagcaagtgagtgctccgtggttcctttctctttcttctgagcctgaaatctgaaaaggtgcatgtgacactgtcttcaggtgagctgagtcctcccacatcaatcgttaatcaagaaagcactcctcagagccaccccaggccagtctcaaggagctgttttctcagctgagagcccctcgtccagccttcctctcagctgtgtcaggttgacaatcagcacattcctgtgcctctcctgagtatgtgttctggtactggccggggtaagtgaaggttaatgtgcagcccacctaggccataactagtgtaaactagcctcccctgccacagaatccataatcctcagacatttgtccttggagggctcagtggctgttgtggagggagctttagaacagacatgctgagatgaccagaagggcccgccctctttgatgttcatgaagtaggtggccccgtggagggcacagtgaagacagtgtgggcatgtaggctggagacttgagtgcctggcctgcccctgtataacctgtggctgtgtgttcagctgcagtgcatgctgctgcagtgctctctgaaggaacaaggcacaaccacaacccagcaggctccctgatgaccgtgggctgagcagctctgcccagactctgtgggccctcaggtctttctgtgcggcttctaggagcccttttggtgtgcagagaaggcagtcaggtcttcacttaaggaacacattgttctttcaggttggcacccagccctttaaccgagccatgcttttcaatgttggttttcaagaagccatgaaggacttggattgggattgtctgatcttccatgacgtcgatcacatacctgagagtgaccgaaactactatggctgcgggcagatgcccaggcactttgcaaccaagctggacaagtacatgtacctgtgcgtgctcctcctcctcttcctcctcctcctcctcctcctcctcctcctcctcctccttctcctaagcccgggctaagctgatgagtggcttgcagtgtggtcctgcgtgcagacctcagcagggagcaggcgtgggaccaggtgtcaccattttgctcactgtggaaagtgggtcattgtgactgtgggggtgtgaagtggaaagtggattgtattttgactgtggggtatgaagtgctgtgaagtgggttatattgtgactgtggggtgtgaagtgggttatattgtgactggggtgtgaaatggtcaggtagtaacagcccgaggtggcagtggagtaactgaactctgattgtgaccttggttggacattgagtgagttctgtgctgtcattcattgtgcaatgagcttggtgctcagtcctcttgcctgactgggtgaaccgctaagtcccatccccagccttgcaggaaaacaaagccaagctcctgaggagctcagccccagctctctaacccaggcggctctcctttccaggctgccctacactgagttttttggtggcgtgagcggcctgactgtagaacagtttcggaaaatcaatggctttcctaatgccttctggggctggggcggagaagatgacgacttgtggaacaggtatacacccgtcccaccccctgagccactgtcaccccctgcactaccccaccctcaccccctgaagcatccccacacagcaccacccagtctcacagaccaggagccacacggtcactttgcacccttgcagccatgttggaaaaagctcccaggataacgtctccgcatgcagtcggtgtcaggctgagggtatgtcctgccctgcacctttgcgtgctcctgcccagcttttccctgtgagcagccagcgcccgcacagccttcctggactgagttctagggctgcctgccttattttctttcatgatggagatgagtattgagagtcagatgagtatttgtagtttgttttaaaaaatatacagctagaactgtatagacaacagaaaacccttctaacgcaaactaaaagtatattttctatgtcccattaaggcaactacacattttcccctttgacatgaaaaaataaacttaaaataacagcttaacaccttttgtatactaatgaacatggggcctggaaaagtgactcagcagttaagaacacatacggcttccccagaacacctaagtttgcttcccagccaagtgtaactaactctagcttggaggattcagtgtcccctgtaggcaccagcactcacatgcgtgtgctacacacatacacactcacacagacagaattaaaatgttaaacattaattcgaggccagagaattggcttagagagcttgctactcttgcccagaacttgggttcaattcccagcactcacatggcggctcacaacagtccattataacttcagttccaagggatcctttgcctacttctgacctccaagggcaccaggcttgcatagggtgcgtgtacacgtatgcagacaaaacactcatatacataaagttttcttagactataatttcagctcctaggaggctgtggaggagagttctgcgaggtcaaagccagcccaggctgcctagtcagactcttgcaccatagagcagggaagagaagtctgcttactggaaaattcataagaatagaaatcagtttccccagtctgcacaccccaaaacagcatcattaccatttcagtgtgtctttaaaacatggcgaatgagtcacgccagatgtgtttgtcagtttctcagacctgtagtggcggcatatcagtcccagggtgagtatccctgctggggtcctgtgtggaataccatctgtcatttacatgccttcttactggcatggtcagtgttctcatgtgtgcgggctgtgactaagcaggctgtttcacttgcactgggccttgggaaagatcctagaggtgaagttggtcagaatgcagtgtgttaaggctcttgggcttcgttgacaacttttccccatgttccctgtggctctctgtgctacgtggccacattggtgggacctccctccccaagctgagggtggactgcttggtgacctgctcaggtgtggccctgctgtgttggggatctttcagtgaacctggaattcagtgattcagccagcctggctagcactgaactccaggcagagagctgccctcgactctcctccgcccagtgctggggttatagacacagcggggccagcttttacatggcttcttggagatccaaacccaaggccccgtcctgcaagcttggcacttaccgcctgagccaccttcccagcccctcagacagaaaggagtgctagttaatcctctgcggagagtcccatgccgggggtgccatcctctgttcacatgggcagcatttctccagattaaatgtttactgtgatatacagtcaaaagcacattatgacaggtgtggctcaggaatggaacattttcctagcatgcactagccctgactgctctctctctctccctccctccctctccctcttaaaaactgagagaaaacctggagctggctcagttgttaaaagtgctggctttgatctctgaaaccatgtttcttgtttgtttaaaggcactgagagtggtggctctatctatcagttacttttctgttgctgtgataaaacaccaaggccaaggtgacttctagaggggtgaacgtatctgggcctagggctgcagaggattagagtcatcatggccaggaggcagcaggcatgtagctggagcaggctgctaagagcacacatctgccacctcaaacatgaagtggagagagccacctggaaatggctgtaaattctcaaagcccacttccagtgactggcttcttccagcaaggccacatcttttaagcctccccaaacagcactgccagctggggatcaagtgttcaaatattaaaggctgtaggtacatttgtcacaataccaccacagtaccacatgactataatcccagcccttgggaggcaggcaggaggatgtctgtgagttccaggtcaggcagatctattctatatagggagtcagagctacacagacagtgagaccctgtctcaaaaaagttgttggtctcagtagcacacacctgtaatcccagcaatggaagtggagacctcaaaccccccccccccccccggctgtccacctatgtgatgagctctgggccagtgagggaccttgtctccaaaaagaaaagtcacatggtgcctgaagagtgacatgcgaggttgtctcctgaccttcacaagcacatccaagtgcatgcgtgcacacgcacgcgcacccacccatgaaatgttaagtaaccatcaactagctcagtgagctgcaacagaaggcgcttggacattgttgctggagaggtcgagaggtgtcttaaagcttactagtctctgggtctccgcggctcactgttgttcctttggttttggacagggtacaaaatgcaggctattctgtgagccggccagaaggggacacaggaaaatacaagtccattcctcaccaccatcgaggagaggtccagtttcttggcaggttggtgctgtttattggtcctcagggtggctggtagctgatttctcccctcagctttctcagccagcccattctgttgcttttgtcatttgcggccgtgtctatgcttggcttggcctccagctctccatcctcctgccgttgacccctcactgctgaaattgctgcgtgcaccagctctgccacagtgtgtggcgggcaccatgggtgtgcatctgtcctgatgagccagggtagacattttaggtgaccattggtgagatagagttgaggtcaccttctgctaacccctgtgctgtaaaggtatctacaagggagtggtagggctctaagcctgacttctttctgcccctcctctgtaatctccggagctccccagttctgacctgggattcgtctctggagcctccgtttccttgggcctcagaggcattagatgagatgctggaagacgggtccaggcatctgccctggacttgtaaagctgggcgtcagctctcctccctctctgtcctcggctccccaggtacgctctgctgaggaagtcaaaggagcggcaaggactggatggcctcaacaacctgaactactctgcgaatgtcacgtacgacgccttgtataaaaacataactgtcaacttgacacccgagctggctcaggtgactgagtactgagatgcgaagagaagccgcactcacctacccaccgctcccttggacgggctgcgacccgccatcctgggggtcaacacaggaggacagaagagagtggagcacaggaccataggggttccagaaaactgtcacagagcacacgcacaaaggccttcgctgtagggcccaacagggacaggagacttgaggacacctgtcatcagcactggtgtctattccacaagacagatgtctgccctgccactcccttccgtccgtccctgtccgtccccccccccccaccgcccccaggtcctgtctcagctgcaacccatagaactgcagggccaggctaggtgccccttggatagatgggtggccaagccccctggcctgaaggcccgtctctgcatctctacagttctctttggttttcatttttcatttggcttagtttaggggtttttgtttgtttgggtttttttgttttgttttgttttgttttgttttggttttggtttgtttgtggggttttggggttgtttttttttttggtggttttttttttttttttttttaaagaaaaattttctgctttgggtggggactgaggacagaggggagggacttggtgtgatagacatataacagtcacttcttgaagaagtgcagttgtaaataagccatgtaaaatgcctttttaaagtttaattttatagctggctccacatcaaagtgagggcctcatatgttagatcaccttgggtggcaaacaccccagttcccacgcagttgagtgtcatcacccaagtccctgtcatctaggaaggaagtggatgcagggtggaacaaagaacctccggtcactgtagcccctcttctctgctctgcccctcctttcctgtcccctcctttagccccttcccccaaggacttcctcctggagactcagcccctaagctggaactgctgttaggggcacagtgctctcccctcttacagacccagcggagccagctgggatgtgcaggggaggggaggcaaaggcccagggcacaggcttatcactccagtatggatggcgggagctagagaccaggagatatgaggccagtgtgagctgtgtcacaagttccaggtcagcctgtgctgtgtagcacagtccagctccctacacctcctcacacacacagtggctgctgggtgaccgttcccttttttctttggaacttggccacagtttctctgggctgtgcctgcatgaccagctggcttcagtgatttctccgtttccctctttagtttctaggaagccactgtgctgtgctaagaagcagttggtcaggagggctcagcccaggagcaggtggccctggggtgcatgtcagccaggggccagtcagcccagcagtctcccctgctccctgacatgagttcctaaagggcactgaaaagggcacctccttcctgtgtctgcctccactgcacccccagtccctaaagcagggatcgtgtgtggtgaggaacgctctcttctggcctcaagctctttgcctctttgccttcagcacccttgatgttcatggtttacatgggtgggggtgggatgtagatatgtgggggtggggttttgcatcacacagttggttctgaggacagatgatccccacagactgtgggagtgattggccaggccttgttttttcttgtgttttgttctttttgtagactagtgtggtaactagggaacagatggcactgcagagtgcttcccgctcatatgagagagcaggtgtctgcccttgagagctggtgagccgcgtcatctgtttgcgctgggcaaggagctgcaccgctgcgttgacctgccttgtcttacggtacacacagcaataaagcctgggttccgcccggtctccaccctccctccgcctcccttggttagtttcacagtgctggcaatgaagcccgtggcccaccacgctaggcgagtgctctgccactgagtcacggcccagccctctctccctcattcttctgtttccataccaaaggccaggagtgcttcactgtgctggagccatggtgtcctttggagggacaacggtgcacgcggcatgtatcctggctgaagcgctgcaatcttacactagccacagggtactgttttgagccaaaggctgatacttaattgaagagggaaaatgcagatttggggacaaaggtctttttactgctcaagtagggtcgcttctgtcctgttgcaatcatgtccaagtttgtttttagtgtggacttttgtgggcactgtctgtcattggccacccagtcacgtaccgagtgggcagtgtcacagccaaagctaccactgagccacagcgtaggtcattgcttgaaaaaaatgacagtgacaatggagtgtgaccttggtgtactgtggcagcccagatgactgagtgctacagacgagtgacccttagatgacctcctcaactgcctgccttgtgtgtgcgcgcaaggcccctctctgcacaggggttcttcgggggagggggtatttgcaaaaccttaattttgttaaaatgggggactctgtcaggggactctgtcatcgcttcccttcctcagaggacagcacagagccgcggcgtacacactgacgtacccaccaccaacagattgaggcactgacgcagccagcttagcccagcattactgtctctgttgtgagcttgctctttgttttaaaaggtgccaggggtacatttttgcactgaaacctaaagatgttttaaaaacacttttcacagaaatagtccttgtcattacattgttcactcatgtgtttgtacatttttgtatgttaatttatgaatgattttttcagtaaaaaatacatattcaataacc

SEQ ID NO: 483 - DNA, 4207 bp, Mus Musculus
gcctcatgtggcccggcccgcggcggccggcggctgaaagcggcgaggcggcggcgcgcgaagcccggaaggcggcggccgaggcccaggcggcggaccggagcggcgggagcggggcccgggttggccctcgagcggccgccggctcagcatgcgcgcccgccgggggctgctgcggctgccgcgccgctcgctgctcgccgcgctcttcttcttctcgctgtcgtcctcgctgctctacttcgtctatgtggcgcccggcatagtgaacacctacctcttcatggtgcaggctcagggcatcctactgcgggacaatgtgaggaccatcggtgcccaggtgtacgagcaggtggtccgcagcgcctatgccaagaggaacagcagcctgaatgactcagattatcctctggacttgaaccacagtgaagcctttcccccaaccacgacctttcttcctgaagatttcacctactttgccaaccacccttgcccagagaggctcccttccatgaagggcccgatagatataaacatgagtgagatcgcaatggacgatattcatgagctgttctccagagacccggccattaagctcggagggcactggaagcctgcagactgtgtgcctcggtggaaggtggctatcctcatccccttccggaaccgccatgagcacctcccggtcctcctgagacacctgctccccatgcttcagcgccagcgcctgcagttcgccttctatgtgatcgagcaagttggcacccagccctttaaccgagccatgcttttcaatgttggttttcaagaagccatgaaggacttggattgggattgtctgatcttccatgacgtcgatcacatacctgagagtgaccgaaactactatggctgcgggcagatgcccaggcactttgcaaccaagctggacaagtacatgtacctgctgccctacactgagttttttggtggcgtgagcggcctgactgtagaacagtttcggaaaatcaatggctttcctaatgccttctggggctggggcggagaagatgacgacttgtggaacagggtacaaaatgcaggctattctgtgagccggccagaaggggacacaggaaaatacaagtccattcctcaccaccatcgaggagaggtccagtttcttggcaggtacgctctgctgaggaagtcaaaggagcggcaaggactggatggcctcaacaacctgaactactctgcgaatgtcacgtacgacgccttgtataaaaacataactgtcaacttgacacccgagctggctcaggtgactgagtactgagatgcgaagagaagccgcactcacctacccaccgctcccttggacgggctgcgacccgccatcctgggggtcaacacaggaggacagaagagagtggagcacaggaccataggggttccagaaaactgtcacagagcacacgcacaaaggccttcgctgtagggcccaacagggacaggagacttgaggacacctgtcatcagcactggtgtctattccacaagacagatgtctgccctgccactcccttccgtccgtccctgtccgtccccccccccccaccgcccccaggtcctgtctcagctgcaacccatagaactgcagggccaggctaggtgccccttggatagatgggtggccaagccccctggcctgaaggcccgtctctgcatctctacagttctctttggttttcatttttcatttggcttagtttaggggtttttgtttgtttgggtttttttgttttgttttgttttgttttgttttggttttggtttgtttgtggggttttggggttgtttttttttttggtggttttttttttttttttttttaaagaaaaattttctgctttgggtggggactgaggacagaggggagggacttggtgtgatagacatataacagtcacttcttgaagaagtgcagttgtaaataagccatgtaaaatgcctttttaaagtttaattttatagctggctccacatcaaagtgagggcctcatatgttagatcaccttgggtggcaaacaccccagttcccacgcagttgagtgtcatcacccaagtccctgtcatctaggaaggaagtggatgcagggtggaacaaagaacctccggtcactgtagcccctcttctctgctctgcccctcctttcctgtcccctcctttagccccttcccccaaggacttcctcctggagactcagcccctaagctggaactgctgttaggggcacagtgctctcccctcttacagacccagcggagccagctgggatgtgcaggggaggggaggcaaaggcccagggcacaggcttatcactccagtatggatggcgggagctagagaccaggagatatgaggccagtgtgagctgtgtcacaagttccaggtcagcctgtgctgtgtagcacagtccagctccctacacctcctcacacacacagtggctgctgggtgaccgttcccttttttctttggaacttggccacagtttctctgggctgtgcctgcatgaccagctggcttcagtgatttctccgtttccctctttagtttctaggaagccactgtgctgtgctaagaagcagttggtcaggagggctcagcccaggagcaggtggccctggggtgcatgtcagccaggggccagtcagcccagcagtctcccctgctccctgacatgagttcctaaagggcactgaaaagggcacctccttcctgtgtctgcctccactgcacccccagtccctaaagcagggatcgtgtgtggtgaggaacgctctcttctggcctcaagctctttgcctctttgccttcagcacccttgatgttcatggtttacatgggtgggggtgggatgtagatatgtgggggtggggttttgcatcacacagttggttctgaggacagatgatccccacagactgtgggagtgattggccaggccttgttttttcttgtgttttgttctttttgtagactagtgtggtaactagggaacagatggcactgcagagtgcttcccgctcatatgagagagcaggtgtctgcccttgagagctggtgagccgcgtcatctgtttgcgctgggcaaggagctgcaccgctgcgttgacctgccttgtcttacggtacacacagcaataaagcctgggttccgcccggtctccaccctccctccgcctcccttggttagtttcacagtgctggcaatgaagcccgtggcccaccacgctaggcgagtgctctgccactgagtcacggcccagccctctctccctcattcttctgtttccataccaaaggccaggagtgcttcactgtgctggagccatggtgtcctttggagggacaacggtgcacgcggcatgtatcctggctgaagcgctgcaatcttacactagccacagggtactgttttgagccaaaggctgatacttaattgaagagggaaaatgcagatttggggacaaaggtctttttactgctcaagtagggtcgcttctgtcctgttgcaatcatgtccaagtttgtttttagtgtggacttttgtgggcactgtctgtcattggccacccagtcacgtaccgagtgggcagtgtcacagccaaagctaccactgagccacagcgtaggtcattgcttgaaaaaaatgacagtgacaatggagtgtgaccttggtgtactgtggcagcccagatgactgagtgctacagacgagtgacccttagatgacctcctcaactgcctgccttgtgtgtgcgcgcaaggcccctctctgcacaggggttcttcgggggagggggtatttgcaaaaccttaattttgttaaaatgggggactctgtcaggggactctgtcatcgcttcccttcctcagaggacagcacagagccgcggcgtacacactgacgtacccaccaccaacagattgaggcactgacgcagccagcttagcccagcattactgtctctgttgtgagcttgctctttgttttaaaaggtgccaggggtacatttttgcactgaaacctaaagatgttttaaaaacacttttcacagaaatagtccttgtcattacattgttcactcatgtgtttgtacatttttgtatgttaatttatgaatgattttttcagtaaaaaatacatattcaataacc

SEQ ID NO: 484 - protein, 388 aa, Mus Musculus
MRARRGLLRLPRRSLLAALFFFSLSSSLLYFVYVAPGIVNTYLFMVQAQGILLRDNVRTIGAQVYEQVVRSAYAKRNSSLNDSDYPLDLNHSEAFPPTTTFLPEDFTYFANHPCPERLPSMKGPIDINMSEIAMDDIHELFSRDPAIKLGGHWKPADCVPRWKVAILIPFRNRHEHLPVLLRHLLPMLQRQRLQFAFYVIEQVGTQPFNRAMLFNVGFQEAMKDLDWDCLIFHDVDHIPESDRNYYGCGQMPRHFATKLDKYMYLLPYTEFFGGVSGLTVEQFRKINGFPNAFWGWGGEDDDLWNRVQNAGYSVSRPEGDTGKYKSIPHHHRGEVQFLGRYALLRKSKERQGLDGLNNLNYSANVTYDALYKNITVNLTPELAQVTEY

SEQ ID NO: 485 - DNA, 82903 bp, Homo Sapiens
gggagcggcgaggcggcggcggcggcgagtggcggcccgcgaggcccgggaggcggtggccgaggcccaggcggtggcggcggcggcccaggaggcggcggacggggagctgcgggagcaggcccggcctggctctctagcggccgcctggctgcagcatgcgcgcccgccgggggctgctgcggctgccgcgccgctcgctgctcgccgcgctcttcttcttttctctctcgtcctcgctgctgtacttcgtctatgtggcgcccggcataggtaggaagggggcttgggaccgcggcggctgccgctctggccttgagggacccggggaatccccgcccctccctaaggggccccggccgggaggcggccctgagcctggtcctccgaagactccggagtcctggcccggctctcggggacgccaggacattcctgccctccgcaccccaacaggcgcccgggatccctctcccgcgccagcctccggcccaccccgcccctcctaacgccaccctcgcgaacccgactgtaccttcacgcccgccccttgctccggaacccccttcccgctcttgcctcgctggaactcccacttcccgctcctctgctcgagaactcccgcttccccttcccttccccggggtctcctcgaacccccattcccggcattccccgcaccccagtcccccgcggcgcgcccgctcttcgccgagcccatgtgcccgggtcccaggccgccccaccttctagctcccatccatcctcccccactccccatgactccatcgtttcctgctcccgtgagccccctccctcccctttcttcctctacttcccctattacatccacctccaggtcctcctccctaactcacgttcacctcttcagtggcctgatctctctgcctgccggtggcaccccccttccccttacagaggtccacccccattcaatctcctgctaatcccctgagcgtcccatgcctcttccccatctcccccccccccacctcgcgtacccacaagggcacatccttgtcacctttgcccccagccccccagactttcagccacagcttctttctcaactgaagacctggggaaggggtgctgtctgtgttctttcttccacttctgccctctcctagccttgagggtagatggtgtggttcttcagtattggatagtgcctgctctgcggacaaaggagaagtttaaattgtccgtagagaaggggatatgattggggcctttgggaaatggtaccaggtgagaagggggagcatggaggaaagatgtaatgggtactccttcttttcaaagtcttatcctttaaaggaaaggcggtctctggagaaactgaccctcccacccctcccccgcctgccccaagcatagtcttttataagaccacagggcaccagttaggacaggaagagatcagaaggaaagacagcatgaaggttaagagcggaggacacagaggtcagacttggattccaatctctgccctgtatgaccttgggcaggttactaagcctttgcatttctcctctgtaaaatgggaatgtgagtcccaatctcatacagtgttaaggatggaagtagatacatgttctttaaaagcacttaccactgtacctggtgcttgaagagttttaaaaataagtaaataaaggcagctattacatgtaacttccaggaagaagggagttaggtggaacgcttaaggaatgtgtttgcctgacttggcatcactatgaggaaacctcagtttatggtgaaaaatgatcagaagatgctgctggggtaggggcagggagagtaaattctgctagaaaaattttggattatatggattttaggaaagggttgatggtttagctgtagggaaatgccttttaggattgtagcaataactagtgccattctctgttgacctgtcaacgcagaactagctgaatagagaaatttccagatagagcaggagatcgtctcctgattattttttaagcatattttacttgtggttaatgttgatgttttgaactatcaactagatctgggaagatagaacaggcagcatcagattgccttgtttacaaagtgtcatcacgaaaagtgttcctctaggaaggcataatatgtggcctgatggatttgatgagtagattgtaaaagggttgggattctggcagaacaagaagagataactaattagtggaattaactgagaaaagagttcattagcatgttggctattagactctaataaaaatgggtgtgaaaagatgggatttggacctagaggcagtcttagagccataatcctttttttctccttttgtgaaagtgacaggtacttctggtctgagtccataaatcagctatatctaaatggaaaactatatcccactgggatggtaatcacccttttgatagaaaggttagaagccagattcttcaacagaaatggaacttatcaatttaattaagattcctcaacagtagatttttaggtcagtggaacccctgtgtaaagcgatgtgctactgccatgcctagaatcctatatcactgatagctgaaaaagaggcagagcacttacattttcattagtactgtatccccttgaatgtaagccttctgaaggggaattctacttaggatggaaattttgtttgtgagaaaggggaacaataaaaaaaggatgtggagtagttacatttagctgtttgcccttcctactaatttttttttttttttttgatagagagtctctgttgcccaggctgtcatgcagtgatgctcatagcttactgcagccttgatctcctgggcacaagggatcctcctccctcagcctcctgagtagctgggactccaggtacatgccaccctgcctggctaacttttaaaacagttttttgtagagacaggatctcactatgatgcacaggctctgttgaacttaaatttttagaatgtctagctttggacagtggggcggcaaattttttcaaggttaaggcaatctggagaaatagaaggttgttttgtgttccttgggttatgaagaccttatttgaatagttattaaaatgagcttagaaaataatactaggttggctgggtgtggtggctcacacctgtaatcccagcactttgggaggctaaggtgggtggatcatgaggtcaggagttcaagtccagcctatccaagatggtgaaaccctgtcagtactaaaaatacaaaaattagccgggcgtggtggcaggtgcctgtaatcccagctactcaggaggctgaggcaggagaatcacttgaacccaggaggcagaggttgctgtgagccgagattgcgccattgcactccagcctgggtgatagagtgagactctgtctcatacacacacacacacacaaaaaaaaaaaaaagagagagaaaataacagaaaataacattaggttgagccatatgaaatttctgtttttgcaggtcaaaaacagttgtatatcagcagtttcatgtagttcactttaataaatttcccaatgacaattctgttttctggcacagtggaattattggacttatatttccttctaggtttaactttttccagtgcttgcttttgatttgctttgtataccctgtggctacattgtgctcaagggctagagatatcatcactccaagagattcagaaatagtagacttgaatttgaaataagaaaaatcatgtagctataaatgttatgaattgtccatgtatactgtaacccagccaaaatttcagcctaaccattaacttagtatttttgagctctaatgccacttaatgtgggtgacccgtattctaagagcaaaggaaacttttcttggacttgagagtcatccgtgaaatggggtaccatctcacatagaaaattggatatgaggaaaattactaaataagactattaatagtgtgtttgcaaaaaatataaaatgccctcagctactataataataccatttgatccatttaatgttttaaaaatacgacttcgttggaattttttttttttttttgagacggagtttcgctcttttgcccaggctggagtgaaatggtgtgatctcagctcactgcaacctctgccccccaggttcaaaggattctcctgcttcagcctccagaatagctgggattataggcgcttgccaccactggctaatttttgtatttttagtagagatggggttttaccatgttggccaggttcgtctcgaactcccgacctcaagtgatccacccacctcagtctcccaaagtgctaggattacaggcgtgagccaccgtgcctggccgggagttgtgtttgtattgttaattttggaagtagtgttttatatcagcaatttaaaaggagaaggttgggacagaaagtgagagagtgaaagagagaaagtggtggatttgataaggagcaaggtaataatgttgcataaaaatgtgatgtcccttctcttcaaccctctaccctctggcctttatgattctcatttatttaatcacttgttttatttgcaatgttgaaatatccctattcccttcagggttctgcagaaaacttttgaacttatttatgacctgttaacttaaaaaaaaatccgagagctcagagtacttccgtactccagtctgatcaggtcttttaaaagataacagaagcgagctatttataaatatacatatgaggtgctgatttaaaatcttaataagtttatggtaccatcatatggcaaggttgtgtagaggttactgaccttagcaaattgtcgaaacagttatcggtttcaagagaggtgcctgtgcatggttaggggtaattgtttatgcattgatgactttttttttttttttttgagatggagtctcgctctgttgcccaggctagagtgcagtggcgcaatctcagctcactgcaacctccgcctcctgggttcaagcaattctcctgcctcagcctcctgagttgctgggattacgggcacctgccaccacacccggctaatttttgatggggtttcaccatgttggtcaggctggtcttgaactcctgacctcgtggtctgcccaccttggcctcccatagtgctgggattacagacatgagccattgcgcctggccgatgacattttattaattgaaattctgttctacatttaaactaatttttctctttccttgattactgaagaaaagagatggggaatgattttgacatttttggcctgcttagttccaagagaaatttgatttatggctggcttttggaaggcaggagccagtaattctaatcttacctgatttgatcgaatgaccttgagcaagtgacttgatttcaatgatctgatactttcaaaaaatcccaaagccctttgaaaaactagaactgcatcttagtcaatcttttagagaatttttaagaaatcatacctcaataaagctagtgagatgctttcatatatagaatgttgataattcatttacattctacataaacattggtcctaagattttaatttatttttatcttactattttttgagatgaagtctctcgctctgtcacccaggctggagtgcagtggtatgatcttggctcactgcaacctctgcctcctgggttcaagtgatcctcctgcctcagcttcccaagtagctgggattacaggcgcctgccaccatgcccagctatttttttttttttttttgtatttttagtagagacggggttttaccatgttggccaggcaggctggtctcaaacttctgacctcagatgatacgcccaccaaagcctcccaaagtgctgggattagaggtgtgagccaccgtgcccggccattcctaagattttagacaaaaaaaaaaaaaaaaggctgggcaaggtggctcatgcctttaatcccggcactctgggaagccaagatgggcggattccttgtgtccaggagttcaagacgatcctgggcaacatagtgaaacctcgtctctactaaaaatacaaaaaaattagttggatgtggtgcctgcctgtaatcccagctactcgggaggctgaggtcagaagatcacctgagcctgggaggtcgaggctgcaatgagccatgattgaaccactgcactctgtctgggtacccagagtgagaccctgtctccaaacaacgattttagagaagatacatgttttatataatcaaatacaacttttcctaataaccacatgaaaatttcagattttccccattcaagtgtagtctgaaaatagccttttttttttcttgacatgaaaaagccctctgaatccctcagcacactcagtttctgagctttctagaatgaaatacatatggggaaatatgggttacttcacttcagagaattaaagagccttatcccgtgaaggacaccttttttttttgctccaaatccacatgcactcttgcgcacatatttgagtatagtgttgtcccttcttcttaggaggaagccgtgtttggagaacaggttgatgttacaaaagtaaacagcaccacttttgaccaggactttggtgatgttttatgttctctttgtggagtttttgctatattggaagccaggtcttgggtttggagttgaaattttctttagtagaaagaaagtggttggttttggatagtctcagccattcaaacagtattaattactgttccaggatacctagccggcagatgattctgttccagcatcaactccccccgccccagctgaacaggccagtgggagccttgtataataatcaccaggaaggaggggctctgtgttgccatgcctctttagagctctctgagagagcagaaattccaaagcagcagaaggccagaatacaattgacttcttgcttccctaaattttgctgctttttagatcttggaagtatgttcggcacatctaatcacataaggcaaagaaaaaccttagcacgtaagaagtgagcaatgtaatgctgctgaggcctgtcagagaaatagagaaaaagggaggttaccactggctaagacaaacagataatcgtaagcaagcaggttgggtgtgggctgaagagaagaggcaggcctatgtgcactgtggggaaaagggcagttgttcttcactttctagtagccaataaaggtatgcttgcctttgcacacgagttatgttttgtagaaaattgtgaggaaaaattaatgggattttaagatccacttaaaatcctggagctacccaggtacccagcatttgagtgtcatgttatcagttatgggagatctttgaattctaaacttttgactacatctgtcaatttatagatgatcatataagtcaagttgagtcattaacttgcccaaagttgagaattattaagatattcctgaagcacatacaatgtggttgaaaagagatctgggttcagatcagcttggagtgggcagattcattttgttttcaaatagaggatactacctttctcaggctacttgtcagaattaagtagaatatgcacataaaagggcttagcacagagcttgacacaaaggtccttatgtttatgattttttttttttttttgagatggagtttcgctctcttgttgcccagactggagttctatggtgcgatcttggctcactgcaacctccgcctcctgggttcaagtgattctcaatctgcttcaccctcctgagtagctgggattacaggcacctgcaaccatgcccagctaatttttttttttttttttgtatttttagtagagatggggtttcaccatgttagccaggctggtctctaactccagacctcaggtgatccgtcctccttggccttccaaagtgctgggattacaggtgtgagccactgcacccggccttatgattcttatttataaccataggaggtgccctcttggtctcatgctcatattaaactgagattaggtttgggctcctgtctgactttaccaataactaggtatgaattttttttcctgttttctgtgaactgaggagactggactattgtgcagattctagggtccctttcagatctgaagtttcatgattctgagcatgtgtgaattgaacctttgaagtaaagaaggaatcattttgtcaagtaaagacactgtcttttaaagttctgatttcccgttgacttcatctcctccccagactgctgcggtgagaatggtgacatgcttgtgtgtaatcttcagactttatagtttcagtctttggggtgaatggcaaggtccccactgtgcagtgccattgctttcggacattagcctgggaactccagacttcgtgtctctacatggaaatctgtctttgaaatcattgtcactaaggaagggagggaaaattgtgctgtcttggtcaaaggaaagaaaatcagaaagaatttttggaaatatctttgggatgttaagaccattttttcctttttttggaccattttttttgtcctgtgggctaatccttttacattttgatctgctaagccagtcctttcctctggcttcacacttcagcttttaagtgtgaaatagagccccagactcattacctcaatcctctaggtagttggatgttaaatgaaaatgaatattgcatttggattcagtaattctttttatatggtgccttttatactgaggagcattccagctcctgctggttgcatgaattcagtgttttcccaagcatgggaatcacattaaataatttagagtgctgccccttctctacttcctcttttttttttctccttttgttagtttgagtaagcaattattagaccctgggtattgttcctctgcctttgcaggtgacggagctacccaggtactttgcagcaatcagaagcgaacctgttcattgtttctgaggcaccttcattactgtcatcaattatgaacagttctcttaggtggttagtagcctaattataaagatgaaaaatattgtggagtattgggtaccggaaagagtaggttgtaagacagcaatgttgtggtttttttttgtttttttttgttttttttttgagacagagtcttgctctgtcgcccaggctggagtgcagtggcgggatctcggctcactgcaagctccgcctcccgggttcacgccattctcctgcctcagcctcccaagtagctgggactacaggcgcccgccactacgcccggctaattttttgtatttttagtagagacggggtttcaccgttttagccgggatggtctcgatctcctgacctcgtgatccgcccacctcggcctcccaaagtgctgggattacaggcgtgagccaccgcgcccggccgcaatgttgtgtttttacatgtcagtggatccagggtatgctagtgagcacaactgtatattatttttattaaaaagttgtaggatatttaaatatcagtaaagaggtaactttttccaccccctcccaagtagtcctaaaagtatggataattgacatttaaaccttcttcttaattctactgtgttgaacaatcataagcttgggaagatggagagacagggttattttttcctcacagagctgctcattatcccattttaagttctactttcaggaaccaagcctaaattgtattcctgatcaggatgtgtgtatttgctgattggtagacttggctggtgaaggtcataaaatagtgttttcctaaatactgtgttgtgtcttgcttatgtaattgaaaaaggaaaaaaatgttttattcctgttcagaaaaatgacagaattgccaacctaaggaagtcaaaccagatagaccaaaaatgatagtagactgactttaggattcatgatatagttattttgaatctgtattttttttttttttcctgagatggagtctcactcagttgcccaggctggagtgcagtggtgcgatcagggctcactgcaacccctgcttcctgggttcgtgtgatactgctgcctcagcctcctgagtagctgggattacaggcgagcaccatgacccctggctatttttttttttttttttttagtagaaatgcggctttgccgtgttagccaggctggtctcgaactcctgacctcaggtgatccacctgccttgggctcctaaagtgctgggattacaggcttgagccaccatgcccggctgaatctgtatgttttaaataaaagcatttaatgctttaacttttttagaaaagctcatttgacccatatcctcataatctatatagtcatgagagggaagttttctggattgtaatttccttgtgcctaggatggtgcccagcacgttgtatgtacttaaatatttaatgaaatgaaagaagaaactattgtctgggcagaccagcctcttggtcgttggactgcatttactttggggaaaggaattaattaatcctgattttgaagtgactgaattaattttttccaaatctactttgtacatttttcttcttttggtggtaaaatatgaaatttgccatgtatctattttagtaatttaagtaattaagtgtacagtttagtggcataaattacattcataatgttatgcagtaatcacttttttttttttttttttttgagacggagtctcgcccaggctggagtgcagtggcgccatctggtctcactgcaagctccgcctcccgggttcgtgccattctcctgcctcagactgtcgagtagctgggactacaggcacccaccaccacgcccggctaatttttttgtatttttagtagagacggggtttcatcgtgtcagccaggatggtcttgatctcctgacctcatgatccgcccgcctcagcctcccaaagtgctgacattacaggcgtgagccaccgcgcctggccagtaatcactattttttagggtttttttttgttttttgagatggactctcgctctgttgcccatgctggagtgcagtggcactatcacggctcactgcagcctcaacctctcaggctcaagtagttctctcacctcagcctcccaagcagctgagaccaccagtgcgtgccagcaagcccggctgatttttacattatttgtagagatgggattgccctatgttgcccaggccggtctcaaactcgtggactgaagccatcctcccacccccgcctcccagagtgctgggattacaggcatgagccaccatgcccggcctgttaggagttctttacggattctgaataatattaaacctttatcagatacatgatttacaaatattttctattctgtgggttgtcttttcacttctgatagtgtcctttgatgcacaaaaaagtttttaatgaggcccaatttacctaattttttgtttatgcttttaaaatacactactttgtaaatattatcacttaccttttgctccctacagtgtgcccattctttttctgcccatgaaggtctttataagctactgatgtgatttttgagaaagcaggagtcatggttttttttgtttgtttgtttctcttgctctaacgtgtttaagtttgaagctgttttctttctttattattctctgtctttattcatttatttagattcggattcggcaggcgacacgggatttattttttgccatacaggaatgaaaagacatgatgatttcgaagatagggaaaagcacattttgtttggtatttcctttttttgttgttgttttttgaggtggaatcttactgtcacccaggctgtagtgcaatggcatgatctcaactcactgcaacctctgcctcctaggttcaagtgattctcctgtctccgcctcctgagtagctggggttacaggcgcatgccaccacccccagctaatttttttatttttggtagagatggggtttcaccattttggtcaggctggtcttgaacacctgatccacctgtcttggcttcccaaagtgctgggattacaggcatgagccaccacgcctagcctgtttggtattttcttagccccaaatctccattaatcagcatcatttatgttttggtgtttagtattaagtagttacaataaagaccctgaggcatgactttcagtttggtattgtgggtgttttttttgtttgtttttgccttctaattctttgaaaattagtaatgctttattcaccagaatattctgtttccccgtgccttcctcgtccacaacacaggcacagggtggcaggtggtgaagagaaacaggctgccaagatggtccctagatgactaggaggggcgtgatgtgtgcacagggtttttttttctattatcctttataacatcagaaaatgatgtcaaatgctgacgaatgaggaaatagaaaaatctaacgtgtaaaagctgctggactcccacagctctgacttagtaaaatttgacaatttgatacatatttttttttctgatatcagctgaactgcaaatgtatttatctaaatgtgagtgataaaaatggtgattaaaggcaggggtgggtacttagaaaacttttatgttctggtgcctgtgataaaagagaaaaaattacaaactcatctttgcatttgcctgattttgctattttcttatagctaaattcattaatctctgtgtaacacccctacagtgtgctagacttgaaggatacagtgatgaacaaagcagacagtgtatcactgttattttttaagtcttctaaggagcatgcttcactttagtaaatttttagttttgggtgattttatatttctggacagatgtgtttaattgagggccaattcatctggtgttcagttggagttaacattctttaattgccaggaatgatagtgaataaggtagtcacccccttatccagagtttcactttctgtggtttcactgagttctgaaaatattaaatggaaaattccagaaataaacatttcacaaattttaaattgtgcaccattctgagtggcgtgatgaaatctttcaccatcctgctctgtccccctttgtcttgcctgggatgtgagtcattcctttgtccagcatacccacgctgtatacacatttagtagtcgtctggattatcacatcatcatcgtggtgtcacagtgcttgtgttcaagtgacccttattttaattttattatttgtaatacttttgaattttaatcttatggccaggtgtggtggctcatgcctgtaatcccagcattttgggaggccgaggctggaggatcgcttaagcccaggagtttgagaccagcctaggcaacctgggggaaaacttgtttctacaaaaatacaaataaaaattagccaggtgtggtggcacatgcctgtagccccagctacttgggatcgcatgagcctgggagtttgaggcagcagtgagccatgatcactccagcctgggcaacagagtgagactctctcagaaaaattaactttacttaattacttttattattgttataattgttccattttattgttgttgttgttgttgtaaaccaaattgtaaaaccattttatatttgttgcaaaccaaaaagtatctgagacaggtctcaatttatttagaagtttattttaccaaggttaagggcatgcacccaggcccaaggtctgtgcctttctcctaagatgattttgagggcttcagtatttaaagggggagaaattttaggaaggcgtggtagataggaggcaaatggttacattcttttgagtctttgatcagctattcacatgtggcgggcaagggtggggggcagcggaggaatagtcccttatgcattcatctagctcagtgaatctgcatttttacataagacaaaatatacttaccgggcagaggaagtgatgagattatgcatttgtctcaggtaagcagaggaatgactttaagttctgtcctttgtcccatacctgtgaagataagctgtcaatttacgttgtcagggtgaaattcagcagagtggttgtagggtaaggatgttgaggtccacaaggaatttcctattgggcagattgtgagggaggtaggtttgcatgatgccgttcctatcttgacttttctctttgacttagtgggtttggggtccccaagtttattttccttttacattgttattcatcttttactgtgcctaatttataatttaaactttaccataggtatgtgtgtataggaaaaagcaatgtatttagatctggtactacctgcagtttcaggcacccactggggaatttcagaacgtatcccttgaagataagggaggactactgtatgattcatagcacagtttcagattaatcatgtccgatgcagtcagatgcttgatggttatatggggcctggtttgtgggcaaatgactagtggggtttttttttttttttttttttgctcatttaggattcaagatgggttttaaccttttaagttacaattaagcactttgtgtcgtacagtatgtatacaataatgctttgaaatggctagtcatgaatgtattaatggtttgtcttgcactgaaacctgaaatgtagatgaaaaagttgataaacataaggcaatcagtactgattgtcattgtcatctaccccagtacattctaagtgtggtagatacagtaattcttatatgttgctattaacgtcatttctgatttttgattagaaaaatatttaggttaatggctttcttgttggtttcaaatttatagtaaaagctatacctttatgtcttgaatctgcttgccagtctttgctttgataggtggtttttgcttaggctacgataaattgtttcatcttttctaaagagggatgaggaagtatttactttgtgaaattggaaaaccgtgtggttggtgtggaaaataagcatgttattaataaacagctagtcttgtgctccatactcttggatggaaggtagaaataaccttgcctctattgctgagatttaaaaaaataaaaagctaggctactacccgtgccttcctcgtccacaacacaggcacagggtggcaggtagtgatgagaaacaggctgccaagatggtccctggatgactaggaggtgtgtgatgtgcgtccagttgtctggatggggcaactggaatccttcattgtgtggttcatgcttgtgtgtgtgtgtgaatgcgagagtgggaggaagttcaatgttttggctttggtgtgggattaattttctcttcgattgttaatttggcatacctgactttttcattctggtttaaagtattagaaatcttaagatttgtgtgaattagaagattgggatttatttgaatttcatttggcactagggaaaattcactttaggtaagagctactttttgggttggctttatgttcaaagcagttttttccttaagagtttcattttattatggaaattttcttttttctttttttatttttttgagatggagttttgctctgtcccccaggccggagtgtggtgccaccgtctcggctcactgcaacctccactttccaggttcaagcaattctcccacctcagcctcccgagtatctgggattacaggtgcgtgccaccatgcccggctaatttttgtagtttttactagagatggggtttcgccatgttggccaggctggtcttgaactcctgacttcaggtaatctgcctgcctctgcctctcgagtagctgggattataggcatgagccaccgcgcccggctggaaatttccaaacatataaaagtaaacttaatagtacagtataatggaccccatgaacaaaagtaatttttctaacctcaaaagcaggggcagtttatttaatcaggtaaaaactgagccttaaaagtcagactttgctaaaagaaaacagtatttttttcactgtcctgaatataacattaaggaaataggatttggttaggtctagataacatttaataatttcaactgtgttaaagacaaaagtaatttttgatgtgaccatggacttgtcatgaaaaatataaaggtgaaagggattccatcccccttcctctaaacagaatggaacataagcacaggtttaggctaattcataacctggatttttaaagcttttacatagttgggtttcatgttgttcagatgtcttactaaaccaggtatctaaatgagtgtttttctgttaaaaaaaaaaaaaaaaggacatgtccccttcctctgccatcccttaatcacggggctccactggaatagagatgggcggataaagaaggaaacttagtgttagcagctccagtgaactggtatgaggtagaggagggttgaagccattgatcacagtgacgtttccagaggatttaagctttcccattgtcccatccttcatttgaaccctcagaatgtacagccagaagtccaagagcaagcgtctctgcgaagggtaaaccttccaggctgtgctccctcaaaggcgccgctgcgcttgaggagcaggtgctgtggctgctgaagtcaggtgctctgggagcagacaacaactgcctgggtgtgtagcacctgtgtccttttggctcccctggccttgtcttctgagactctgttgttaatttctttagctgtttatgtcagctttgaccaaagcccactgcaaagcttagaagggtaaggaggcaacaatatccctttgaagacttattttggcacagattttgtgatttgtgaatagtaacattcctcagtagccacaaattaaacaacatcgatctaattttggtattaattagttgtataattaaaatagtaaaaccatctgcatagattgaagctatagtttcaggttgtattatatgtgtgaaaaaccgactcttcattgtgaattttgagtagacttcccagtagattatttatgtaagctgtgtcatcagaaacattccagaatgaatcacgtttaattaggatctaacaaatgttaccacctttgttctgttgaacaatatttttaaaccattaaatcaacttggttgataaaaggaaattgcagtaatttattcataaccctttcatcacaagtgttttcacttgtgtccttgtcattgtatacacagatatttgaaaattttgcacctcaggaattgctgggctgggagaaaaaggatggcagcaatttaaatctgtatttgtgctagaataatcttttacaatctctttgctataagatcttttcctggccagttctgttttccccactataacgaaacatcctgtcttaatataagattatttctggcaagggattcttgaaagctgtaaagaaaacatacctgctgtctttaccgataatgtggaaaacttcatgggaaattctagccccttcgatgtcaagtctatttaatctcattcctttactattaataaatttaaatagatgaatttcaaatctcattaaatgttacaacagtatgtctaattagtttttttctttctttgattggattccacaaagtagaataaagctcttctcagaaacctgtttggacttagtaattatttttctctagattgttattttttctctagtttgtcaagagtgagtaaactttgaatgattgagagtctgttatgacataggtcaaatcaattgagcaggaccaaagagttgggctaccctggtcacattaactatatacatttactgcgattatttccattgtttcttcatacacagctgtgtgacacagcgtgccttttgcatcggtaaaggagttaaatctgtagttaatttgtgtggcattctctaggctgagccaggctttcttagccctttggaagatcccacatggaagcattagacataatgaaaactcagcatatttctttgcttctgagttgttggaaatgattagattgaaactcaatgtgttgttttcttttcccacccccaccctttagaaaggtatctgtatgtacagaatgggaatatcattaatgtcatgcagtttattcttttctacaaaggtgattatattaaatagttctgctataacatggcataagcatttctaacagtgaccacactggccgggcccggtggctcacacctgtaatcctagcactttgggaggccaaacacctgaggtcgggagttcaagaccagcctggccaatgtggtgaaaccccatctctactaaaaatacaaaattagccgggcatggtggcatatgcttgtaatcccagctactcgggaggctgaggcaggagaatcgcttgaacccgggaggtggaggttacagtgagccgagattgcgccattgcgctccagcttggcgacagagcaagactccacctcaaaaaaaaaaaaaaataaaccacaacagactgtcatgataggttcacttcaccctgtggttaatgagttaatccatataaagcagtggtctccaacctttttggcaccagggaccagttccgtggaagacattctgaaaggggctggggattgtgtagggggttgtgtgttgtgccactccagcctgggcaacatgagcaaaagtctgtctaaaaaaaaaaaaaattactgcactatgccagattgttcaataaaagccatagagattatgaaaaattggagttaggtgtgcaaaaactgcattagttactcatcaccaaaaaaaaaaaaaaagaacctaatgaaaacagtgcaggtgttcacatgttaagcagttaaggaatactgtaaatatggcactttgaaaatctaaatctgtggtttgctcatagaagtgagcatcagcagggttgcagcttgagttattgtgaagtggtagaaggagggttctctgaaatggcattgagagttctaacatcagatgtgtgtggcacccacttggtgaactgagtagctggtagatgcttcaggggtgtgtgtgtgtgtgtgtgtatctgtctgtctttccagctgggtgtagttttctgggttttcctcgtggatgaaattgtgcatatgcaaaggcagagttcaggttatgcgcatattgttcccaggtgttatcagttgtgttagagcaaacttgccttccctttccctttccctttccctttcccttttccctttccctttcccttctcagcagggccttgctgtgtcaccaaggctggagtgcagtggtgtgatcacacctcattgcagcctttacctcctgggcccaagtgatcctcccacctcaccctcccaagtagctaggaccagtagctactttttaaaaaatttttttgtagggactaggtctccctgtgttgcttaggctggtctcaaattcctgggctcaagtgaccttcccacctcgccctcccagagtgctggggttacatgtgtgagccaccgtgcccagactttgatttgcctttgatttaggaagaggaagttacagttttcccaactataactttcaaaagttatagttgggaaaagaaaaatagatgcgcaaatcggtggtaggtaggtgtgaagcctaggtaaacccattcttttcccatctaggcacatcgcctctctatacagaaagggcactttgaagtatgaggaacatactttttctaacttctttctggaaataaatgtgaaaattagggtgttaataaaaagtacgtttacataagctgtctgcttttcaaggaagagtggcttagacttctgctagcttagttgatcaggtcatctcacttctgttatttttttgtaaatctaatgaggtggctaattatcgaaagtgaggtgtccatcctgtcactttgagttatcttccaggtgcagagattaattttgttgtgcctttgttcccttcattaactgtttgtgggtaggcatttgtaaggtcactttctgggattggggaacctcccctgaggctaccccttatgcaaagagttgttctttatgcaaagctgcatacctgccctggagtccacctggcaccttaacctcatttgcactgttctctaaacttctggggcctagctagtcacctgagcataagcgcacactgctgccagcaggcttttggaaaatgtcttaaaaagtggtggcgaaagtaagcttgtttcttgatgatatgtaaccatgaatagtgaagacgtttatactcagaattcctagactcctagaaatcagatgtagagagcttccctattagtcatctaccttagggcctttagaaacagcaaggtagagatactgtgttgtgttgtttaggacaaggagaattagcctgcaccttggagagagaaactgcaatgagctgtggagcctaatgattcttagctcttgtccccgctctgcaacttactggtttggtgactttgggccagttactggaccattctgttcgaacttcagtttcttcattggaattgatattagtttctacctgatagtgaagaacttagcaaagtccctgtggtggcaagcatatgcagtcagtgttattgctaccatgattgatattctgactattgggagattataatctcagatgtgttttcaggatgaattcacaaacacagtcatatgttgcataagtatggggatacatcctgagaaatgcgttgttaagctattttgtcattgtggcaacatcatggagtgtacttacaccaacctagatggtatagcctattacaccccttggctgtatggtatagcctattattcgtaggctacaaatctctacagcatggtactgtactgaatactgtaggtaagtaaatgtgtagctaaatatatctaaacagaaaaggtatagtaaaaatacagtattataatcttagaggatcaccattggatatgcagctagtcgttgactgaaacgtcattatgcggcacatgactgtgtaagatacaacaggatctgaagaatcgcaacattttggataattttttttggtgtgtgtaatttttcaaaaacataattgaacttacattatatgtacagttttatatactaactaaaaacgttaaatgtagtctagaggcagtgtgacaggttttcagtggaaaggatactcaaaattattgggcttacccctgtatcttacaggtgggaaaacagaatcatggaaaggtttaaaggatatactcagcctcctaggcaatgccagcactacaactgagtcccattctagttgttattccaaggattttcaccagtttacatcaggaattttcataaagttggcattggatgatgatatggtgataccaagatattttctattgtttttgttttgttttgttttttgagacagggtctcgctctgtcacccaggctggaatgcagtgatgcgatcatagctcactgcagccttgacttcctgggctcaggtgatcctcctgcctcagcctcctgagtagttgggactacaggcacgcgccaccatgcctggctacttttttttttttcttttgtagagacaggctctcactttgttgcccaggctgggatgttttcttttggatgggagtgaaaggcttatgtataaatagaaacagcacactcaacatacctattgtttttataaggcacactacagtgaatacattaaaaaaaaaacagtaggtgagaatactctgaagatagtgagaaagcataattgtaggggacatagtttttaaatggttgaattactgtctgaggcctctttacagacatggggtaagtgggatgccaaggtgtgttgttgccaggagaatcaggttatatgtacctttgggtggcagcaaggataaatcaggacaaagggcattcattcattgtagcttcataatcacagtgtgataaaatcagtcatttggtgatcattacaggtcagtcactgcctagggttttgttttttccccggtatctttattttggattttaaaaataatacattcagtgtataaaatttgggaaatacagcgaagcataaggaaaataaagacaatctaaaacctcataacccaaagataacacactgttaacattttggtgctttttcttctggatctttttttaggggagtatgtgtaatttttcaaaaacgtaattgagcttacattatatgtacagatttatatactaactaaaaatgttaaaactgtagtctagaggcaaagtgactgtcaggttttcagtcctgtaagaaaatgtggactctaccatatactgcagaagaacatgttttggcgtgtgggtttttttttgtttgttttgtgagactctgtcactcaggctggagtgcagtgtggcaatcatggctcactgcagccttgaacctcccaggatcaagcgatcctcccaccttaacctcctgagtagctgggactacagttacgtagtaccatcacgcctggctaatttaaaattttttttgtagagacagggcctcactatgttgcccaggctggtctcaaactcctgggctcaagcagtccttccacctctgcctcccaaagtgttgggattacaggcgtgagcccctgctcctggcctggcatgtacttgatataggagcagtgtctaaagctggctgattgccccgcaccgtcattttaatcagaatgactcatttttcccatctatagctagtctcaaaaattaataataaattacttaaccctccaggaagtttcagcaaacacccggttgatcatttaccactcttatctgctatctcttaaataatattctaggaccagagcacaggcataatctgctaatttacgttaaattatctgtctgccagttagagccaggtaactacagttcacagtagaggcagcaatccattcttgccaagaaaggattccatttggttatatgcagaagggaaacccaggtattcaaggaatataaattatagataaattgcaatttcagggtaaggattcttctctaggatattttgtgtctccatgaattcataaaaatagaattttaggaaacaagaatacttgtgttgaacatatcaatcggtatgccttctttgagactaaacatttcattgaaaattagctgttagattgataccatttaaatggcttatatgcatttaaagatgtaacagatataacttttttgcaactttttgtaagtattaaatttagcttcaggaatatggtttcatttactattttataattaaaatataattgtcacccccccctttttttttttgagttagagtttcactgttgttgcccaggctggagtgcaatggttcaatctcggcttactgcaacctccgcctcccagattcaagtgattctcctgcctcagcctcccgagtagctgggattacaggcatgcaccaccatgcctggctatttatcccttttaaacattacttttctaagactgtctcttcacaccagagacttgaagattgttcaaagtgccgtgggttaaaaataacacttgtggccaggcatgatggctcatgcctgtaatccccgcactttgggaggcggaagtaggtagatcacttgaggtcaggagttcgagaccagcctgaccaacatggcgaaaccctgtctctactaaaaatacaaaagaagtagccaggtgtagtggtgtgtgcttctaatcccagctacttgggagattgaggcaggagaattgcttgaggccaggaggcagaggttgcagaaagctgagatcatgccactgcactccagcctgggtgacagagggagactgtctcaaaaacaaacaaacaaataacaacaacaaaaacacttgtgctatgtatgcctagagacctagctcctcagaacctgaggccaggagttccaggacagcctgggcaatatagcgagaccccgtctccaaacaaacaaaaaaacatttattctgagagagggaaataagggtagggattgactggaaaggggcttgggaaacctttcaggagtgattgtaatgtttcatatcttgatagggatttagattacacaggtatgtgcatttgtcaaactccgcaaatgcacacctattcattgcatgaacttttacaccaagaagggaaaaaaaatctaattaattaacatgcatgttgaagtgtttagcaggaagtatactgatctccgcagtttacttggaaataggtcacaaagtaagatggattaatggatatatttgtgataagcaagttaatagtggaatcaagatggtgagtatatgggagttcactgtaaaatcctttcaactttgctgtatatttgaaatttttcataataaaacggtttaaaaatgttaaaaattttcacatcggtgattagatatcaaaaaagatgttacaaatttgtatctgtgaaattgtagttcccacggggcagaaacggatccattgaatcacaccactcccgtgatcattttaactttgagattgataagagagtgagctaagaattatcaggttcttcatcctcagtatgttaaggatctctcttatctttctcattgagtctaaatattttttttctgattattttgctgtctttgttacttggaaatcaagtaacataaatcctgtataattgtcaaagaggtgacatctgtgtttatttctgcatgtatcatccaatggatacctaaacactgttttgctgagacattttctcaggctagcactcaatacaaatctgtatttttctattctccttccttctcctccagctttcagtctagatgttttctgatggcatagcttttggatcaatcattctctttttttgctctgtcttacccaatattaaaatattacaccctgttttttttttttttttttgagatggagtttcactcttgttacccaggctgaagtggaatggcacgatctcggctcactgccacctctgcctcccggacttaagcaattctcctgcctcagcctcctgagtagctgggattacaggcacgcgccaccaagcctggcaattttgtaattttagtagagatggggtttctccacgttggtcaggctggtctcgaactcctgaccttaggtgatctgcctggcttggcctcccaaagtgttgggattacaggcgtgagccactgcacccggccttgacactcattttgtcctatcttttggcatgcctgttaatttttattgaaaagtgggcattgtatataaaaaaattgtagcgaccctagatgattttctaatatctagatggcttacaccatttgctaggcaaatagaatgggggctgattccatttatcttgtctgagctgaccacagcaagggcgtggttttggtcaggctccatctctttttggtttgcctctactctttggaagtaccctgcaggagttctggctaagaactggggcccttcccccatggtgtgtcctgaactttaatctttgtcccccacggtgtgtcctgaactttaatctttgtcttcttagtacatgggattggtgaagaaacctgctgtgctattcagaggctttctgcttggtttcagccttctgacctgtgcatctttgggattttgtaaaatgtcttcagggtaaaacactcagttcttttcacaggaatcctaggcccttgtctctatttttctttcttcaggcctgagacattaccatgagctctgctggtttctctgcctgtgaatagtggctctggtcatgttcccaggctgcttttctgtttcctcagcctccttcctggcacctagcattggcagattccctgaggggcaaagcagttgtggcatattggcttgctcctaaagggtttacccttccggattgtgtctcttcaagtcatagtagcttccacagttctccaaagtcttcagactttgaaaaaaaaaatttttttttttttaattttctctggctgttggagttgtttctctgagggatctctggtctgccacaggctctcagtcatagccagaagcagaggctactttatgcaaatcttgcacatgtgcattgttacttatgttgcagaaaaggtgatgctagtctgtgctccatttactaaggaagaaatattcagtttatagggaatcgaaaataaattatctgtttattttattttattttttattttttcccaggacagagtcttgctctgttacccaggctggagtgcagtggtgcaatcttggctcactgcaacctccgcctcccgagttcaagcaattctcctgcctcagcctcccgagtagctgggattacacgcgcctgccaccacacccggctaatttttgtatttttagtagagacagggtttcaccatgttggccaggctggtctcgaactactgaccttatgatccgcccacctcagcctctcaaagtgctgggattacaggcatgagccaccgcgcccagcatgtttattaatccaataaatgtgaaccagcaaatataaacttaacgtttatgcattactgctgtactttctaacagtgtcagtggttaatttaaaagtcagtagaagttaagtgatttgtctaaggcagagtttctcaaccttggcactgttgacatgctgctttgttgttgaggctgtcctgtgccttgtaggatgttttgcagcctctgtggcctttacccaagagatgccagtagcacctttctcccgcagtggtgacaacgaaaaatgcccccagatactgccaaatgtcccctgggaagcaaaagcacccctaattgagaactactggcctaaaggaagggaatagttttcctaatttgatataatgccagaaaagcagaattggattttgagttactcaagtcattgtctctgaccattggactatatgccagcttcattcttttttttttctttggtaaagatggggtctcgctgtgtcacccaggctggagtatagaggcataattatagctcattgcagcctcgaacttctgggctgaagggatccttccacctcagccttgtgggtctctggggctgtaggtgtgcaccaccacacttggctttttttttttttttttttttgggcagagacaaggtcttgctatgttgcctatgcaacatagcaagaacccttggcctcaagaggtcctcttgcctcggtctcccaaagtgctgaggttacaggcatgagccactccacctggcccagcttcattttttactgacaatttgatggtaaattctagggtcctaaaaatggttgtaagagtaaatgtattttttttttaaccattggcttgccatctgtgaattgggaacttaggtcacttggttgcttattctagggttaagaagacagactcttgatttctaggcagtagtaagtgttaacatcctatgtgtggtatctcttgggcttctgcagagcagttctgttgcagtctgtcttcattggatctaatgcgtgtacagcagttctttaaaactgacaggagcaaaccaacacagagaaatccactcagaatgtaagtagtaaccatttggaatgtaaggtaggaaagacataaagagatcagaattagagctaaaactaagggagaaaaagacagcttagaagattagaatggacaattttgaatggcatgacactaccaaaaataatttaagctgttagctcccctttctcttattctgcagacattttccggttttccaaatcattctgctttgatgccaaatgtcttgttaataatgcatggcttttttatagtactcccttcccatcatgcctcttaggtgctgagtcagaggagatgttacagcagcagctcaggagaaaggagaaatccctctgcaatgctcaaatactactttttttttttttttgcacatttatctcttagcaagcttttcactttaaatactctaaagcttcaattcaggggatgcatttttcttactgttaaagaacaagacttttaaaactatccaaaaatgtctaataacgtgaggtttttgaaagctcttaaaagcagatctaaatgttagtgtgtattgtatttgatttctaggacaatagctgttatttttctacttttctacctattgtctggatatgcctcttctgagtccgtaatttctattctgtaaaatttaaaataatattttcacattgcctttatgatagacagctataggagacaaacagataattgaggaaatgggacaaatgattgtccggtgagcactgggatccaggcttggatccagcgtttttctcccctactgtttgccagcccattgcattctgggtggctactcagaggctgacttttgaggctcagcagttgctacccctgctgctttcaaaggctgggctgtctgggtcacagagtttttcgttttctgttggttaggaaatactgtgttttgaagggccctggtagagggaaagtaatttttgaagcccctgggtttgtggtatgagttgagaggaggcacccactgcacctgctgaagttccttttagagacggcaacatggagaaagtgttcctaggtctgtgatacacatgttagcctcttagtcatgtctgcctttaaactgtgtaacacatcttaacaaacttgggaaatcagttcacctgatgcggagtggtgtgtttaagtgcataaatcagaagtttcctagagtgacagtattctttgttgtcatggatttttaaggtgtaatttagaaattgtttacctctcttcacaatcagaataacaatattgttgaaaataaaataacagcatggaaactctgtgtactatattcacaacttttctataattctaaaattactctaaactgaaaggcttatacaaataataactgtgacttcctgaaggcctactctgtttcaatcactctggaatctacatttgttatttctaactctcctaagactgtaagaagtttggtcacgagctcaagatcacacagctaagccgagcagggactcaaacctctgtcttagctgagtgaaactctaatcctaccgcatgccacctctgttctctggggaattggaatggaattatttgaacaaggacgtggctcttcagtatgtcgtttaagtctgcaggtatgccttgatttctttctgttgtagatcagtacttactgtatggcacttgctgattttgcgtgcttatgttcttgatatgtggcctctttcagttcagggaccaacttttttttcttcttgaggagtcttgctctatcgcccaggctggagtgcagtggcgcaaccttggctcactgcaagctctgcctcctgggttcacaccattctgctgtctcagcctccccaacagctgggactacaggcgcacactgccacgctcagctaatttttttgtgtctttagtagagaccgggtttcactgtgttagccaggatggtctcgatctcctgaccttgtgatccgcctgcctcagcctcccaaagtgctgggattagaggcatgagccaccgcgcccagccaactttttttttaaattaaagtaaattctgaatgaacacattagcgctcaccatatacaagactcccttagagctctgcatgtgttgcttctcttcctgacccagtgaggtaggtactattactttgctcttttttttttgagatggaatcttgctctgttgcccaggctggaaagcagcggtgtgatctcagctcactgcagcctccacctcctgggttcaagcgatcctccctcctcagccttccaagtagctgagattacaagcatgtgccaccacacctggctaatttttgtatttttagtagagacagggttttactatgttggccaggctggtctcaaacttctgacctcaagtgatccacccacctcggcctcccaaagtgctgggattacaggcgtgagccaccgtgcctggctgcagtctttattcttaaatgttttaccaatattaactcattcaatacaaatgagatagggatattattatccccgttttatggatgaggaaacacagaatgaataatttgccaaaggtcattcagctgactagaatttaaacctgtctaggccgggcgcagtggctcatgcctgtaatcccagcattcgggaggccgaggtgggcaaatcatctgaggttggcagatcatctgaggtcaggagttcaagaccacgctggccaacatggtgaaccgacatctctacaaaaatacaaaaattagccgggcatgatggtgggtgcctgtaatctcagctactcaggaggctgagacatgagaatcgcttgaacccaggaggcggaggttgtagtgagccgagattgcaccattgcactccagcctgggcaacagagtgagactccatctccaaaaaaaaaaaaaaaaaaaaaaaaatttaaacctgtctagccctcctccagagttaatactttcaaccattaaaccatttacctgacaatttattcagcttaaagataaaaggaaaaccagaaaatacctgttagactaaacagagcacatttatgtgcagatagtttgcaacttctaaggagaacattatttgtgaaatcaaaacagtttatttctaggataacttttattatttaacttttagttgagaatttgtatttgttgtatataagcatatgtcgtccttctatgtcacttttttttttcctccccagaaacagggtctcccactctgttaaccaggctggagtgcagtggtgcaatcacagttcactgcagccttgaactcctgggctcaagcagacttcccacctcagcctcccaactggctgggactacaggtgcacaccaccatgccgggctaatatttttttatgtcagtagagaaggggccttcctatgttgcccaggctgatcttaaactcctgggctcaagtgatcctcctgccttaacctcctgaagtgttaggattgcagatgtgagccactgcgccggcctagaattggaatcttgaatttttgccttaggctcactaataatactctttaactacatttaacaaatatttattgggctgctgctatgtggtaggcaaacttgtgtgtccttttaggtaattagtgctttggagaagcagaggaaagtggatgctttgcagggagtagagagaggaaattttgcaattttaaatatattgtgatgagggaaggtctcactgaagtgaggtattcaggaggtgtgcgagcaagccatgtggttgtctgggcagcgctgccaagacagtggttgggtcagtggcctgtggtgagagcttgcatgggtatcttcaggacaggacagcgagaaggcccgtgtggctggaacagagtgagtgaggtgcagaactagagagatgaggtcagagggataagggaaatcatttaagagctggtgtagacagacttgctctgcgaagggccagatgtaaacgttttcgactctgcagtccatagcaacaactcaactctgcctgcaatgccgaagcagtagtaggcagtgcacagaggggcacagggtgtccagcagtgctttattcacactggcaggcactgggcaggattcacccaccacagcttctgactcctggtttagtgtaagccattgtccagagtttgatgtgtactctgaatgagatgagaattcattggagggtttttatttatttatttatttttgagacagggtctggctcctttgtccaggctggagtgcagtgatgcaatggaagctcactacaacctcaacctcaaaggctcaaatgctcctcccactttagcctcccaaggacctgggactacaggcgcaagccaccatgccggactaatttttgtattttttgtagagacggggtcttgccaggttgcccaaactggtcttaaactcttgagctcaagcccttcacccacctcagccttccaaagtgctgggattacaggcgtgagccaccacgcccagcctttcttggaggttttcaaatagaggaattagaaaatttgactgctgttgtaaggaatgccactggttgcctaattgagaatgaactgacaaggaatgagggtaaaagggtagagttaccattaaccaggatgggaagactgcggtagaacaggtttgtggacgggaaggacagtgatctggttttggacaaatttgaggtaactgttaggcttctgagtggagatggcagggaggctgttggtctacaatcctggtgctcagtgcagaagtcagggctcaatataaggatttgggagtgtccagcaaacaggtggtatttgaaatcatgagactggatgagatcaccaagggagtgagtgtagatcgagaagtccagggtctgggccttggggatctgcagcattaaaatgagagaaattagtttggggctgttttgtcactttgggagtgtggattctttgattctgattacggatgcatgtagcgctctgactcttaacgtgaattttaaatacagaacctcagtgtccttccggctaagtttattatttaccacctatgttcttcttactatttttttttttttttttttttttagagatggggtcttgctctgttgcgcaggctggagtccagtggtgtgatcatagctcactataacctaaaacacatgggctcaaacaaacctccagcctcagcctcctgagtagctgggacaacagatgcatgccaccacgcctggctaattgtttttggtagaaataaggtttaactctgtttcccaggctggtctcaaactcctggcctcaggtagttctcccacgtcagcctccccaaagtgctggaacttattaaattataattctagtttttatgtacagtttttttaaattgtggtaaaatatatggtaaaatatacataacataaaataggccattttaggttgtcctgcctatggagtagccattcttttatttctttactttcttaataaacttgctttcactttacggaaaaaaaaaagtaccatttaaatcatttgaagtatacaatttagtggcgttaagtacattctcaatattacgcaaccattactactattcgtttccagaacttgatttcttcattccaaacagaaactctgcacctattaaaaattagtccccttctcaacctctattattagtccacctattattagtccccttctccgcaacttctaataatcaccattctactttccgtgtctgtgaatttacctattctgggtacctcagataaatggaatcatataatatttgtacttttgtgttctggcatagttcacttagcatgttttcaaggttcatctatgttacagcatgtttcactgctttttaagtttaaattttttaagttttaattttgctaaacatcctaggatgcacatcagtgcttttattattattattttttaaaacaacctctaatatcgagtcttatttctgacaggaattctttgctgcagaagggtctccatagctcagccttatgttccaaaacactcatggtctctgtgtccagaacactccaagagcttgttgaaatggctcttcagcccatgcagccctcttatttgtgctactagtaaaataatgataatgctattgaatagctggattgttgaccctctggctaatatgatttgatggattttattatatggcattttaatcaaaggataagcttgtctcatttgaaatagatagaaaacctgaaaaagggacagtttaaaggtagcaatcaagtcaaaatagttttcttcttctggaatgtgataaatgtatttagtgagaggtatcttggagagcgtgattttaccacttactcatttgacaaattgctgagcttaggggccaagtcctgtaatatttccctgttgcttcaaggcaggtatactgaaaaaaatcagttattaaatatttgccatatttcctaaataacctattcattctttgcctgataacagcagtttttatggcagcaatatgtgttaaaggaaaacctggctgtcctttggggttcagtagtcaggtccactgaaagttcagctgatgtgtgaaacaaggtttttgttttttgttttttttttttttgaagatgtagtctcactttgttgcccaggttggagtgcagtggtgggatctcggctcactgcaacctccgcctcctgggttcaagtgattctcctgcctcagcctcctgagtagctgggactacaggtgcatgccaccacgcctggctaattttttgtatttttttttttttagtagagacggggtttcaccctgttagccaggctggtctcgaacttctgacctcatgatccgcctgtctcggcctcccaaagtgctgggaaacaaggtatttgtttaactaactttcggtattgtaggaaagactcattaatgttcttgattgtggtgctagagaatgaccaaggataaaatgaaaataaatttttagcttcattttaggactggtgattgcgaaacaacaacaacgaaacagcaaaaaaccctttttagtcaaaaaaattgggggagaagaaaattagaggcaagaggttatttttaagatgtggccacagttcagtctggtttccagtagacttttaggccatttcccataatctattgagtcatcccagcagttctgcagtcagctataatgaaagtttaaaaggaagatcatagtatccattcttctctccttttgtattgtggttaactttgggtcttggctttatgttaccctccccacccccagccccttttaatgtaatcatgtagtgggcaagggattaaattaatgtaattaggagaatggagggaactttgctttgtgctccaggaaccctggggattccccccagcccccattaccagtaacagcactaacaatgtttatattgaagtggatatggaagccaaggatcttcaaggtcttagtagcaagcctagtagtgagctgttaagccaaatgaaagcagtgattgagtctcagcttgtttttctatgagagtactaatacctactttatcgaagttaaatgaaaccttttaacccttaatattgattaaggcttgtgttaggaggaagtttgagagaatgtgtccttgctacatgtctgtccaactcccaaaggcccgagggtacctggatggcttccagggctcagtgattatgtattttatgcattagtaggcttctttcaagatatcttggccagataattatgaggcttgtccttcagaggcagcatgcacaccaccacgtagggactcatggctggtgcctgtcttgcagctagaatagcaagacatcttcattcttggaacagtgagagtgaactcagaaaagggcctgcattcttgtccagccaaattattgttcacctgtcctagactataaataattccatgacatgtgtccagtcctttgtgagttccagggttggttttgcttttctattttgattgccttggacttgctctgcgaaattagtaacgaagttgaccttcatcttttagtttagcccaggactctaggccctgtgtgcttgccatatcaggaggggtgagatcaaggccccacttccagtgtcatttgattctctaccctgccatttgctgtgttctgaagaaataaagtttgtttgctgtttgtcctaaggtggaacatatctttcagagcacatgctaacaagatttaaaagatatttcaggctgggcgtgatgactcacgcctataattccagcacttggggaggctgaggcgggcagatcacctgaggtcaggggttcgagaccagcctgaccaacatggtgaaactcctgtctctactaaaaaatacaaaaattagctgggcatggtggcacatgcctgtaatcccagctactcaggaggctgaggcaggagaattgcttcaacttgggaggcggagatggcagtgagccgagattgcaccattgcactccagccagggcgttagagtgagactccatcccaaaaatcaatcaatcaatcaatcaatcaaagatatttcacctctcacagccaaatacagatgtaattttgggggagtacgatccttattttatattgtgttctgattatatgtaatttttgttttatcctttcagctgcgtaagaaaaactcaatttccactctttttgcagacaattcttcaaaaatagattgcaaagttttcttgtattcattttaccatttgttcttaagaagacttactttaacataattaccaacaaatgtttgcacctagcatttctgctcagagaatggtgtgaaaggggataaaaatagtaagccttagccagtgccaaagttgtcagtggattaaagaatagtgctatcctggaaatgctgctttaggggagttggaggcagggggtcttgctggggatggtgtgcagagggtggttggtgcaggtaggaagaggttccaagcaccttgttaggcttagtttctgtgctattatcttagggctagacttttgggaggggttgtacttgtacttcagtttgtatgtgggtcatgtttgcaccatagcgggtgtggttattgacaactgtgtttcccggtggttccccttccagcccatgctcaccagatgccattagcaagttgtaccttctctaataccctgaggtttttctgagaaggctgcagaaataccccctagaacaaagaagtcagcaaaaacaaaacaaaacaaaaaacaccacttaagggtaagcacacaaacacatacaaatataaggacatacatcataggtattgtaatgttccaatcccataattttggaatgattacataggtggaatacagaagtatccctgcttttcagcatgactgcccttgatgactcatcaaaaaacagcagtgctagtcatcttagacacagaggatgtgtgccatttagacttgttcttttaaatagtgaaaattattgctttatggttttattctgtgccccccgccctcatgcccctatgggccagagaggcagttcaccaacttctctccagttgtgcctccccttccttcctgtgactttagggagtttgtacgcatctgctctagtcctagaaccatggggccttcatagcccctgcgcagtagccaagagcaatgggccttcttacggaaggaagagctcagttggcaagtatatcctgagctgagttgtgaaggcacacattcatacctctctttatttttaatggggttagcacagtcttcaatcaatagcttaacttcatctctgcttttatttctgctcctagcataaattatttagcacaaatgcagacataatctcagaaattacttagtattagtgtcctgctgtgagcatcattttcttgagtgtgttgtgttctaaccgcaaattagcaaaagacccttcaagaaagtctttctgtggattcatttagggggaatttagaaggttgtagtcagtgctacctgatcacttttattttcagtgaaattttgttttattcatagtatagttaatagctttcctgtaacacacacacacacactctctctctctacatatatatgtattatgtacatttttaaaagtcactttttacctggtaatatcttaatcccttaaggatttgtcagttgacccatcggtggactgagtcactttatgagtagggattccgaaaatgccaagctttgtctgggggggttgggttgggggaggatgcaataataaaaactctaaccttgaagatgcggggagggcctacagacatgttggaattcaacaattaggtatattttagtgtagcctcatagtgcagcgacccagctgtaaagatgaagtcactcattcctgtaatgatttgctagcttgttgaactaaagtctagagttgaaaattctgctccttttgaacagtgatctaattgtgaaacggacagttggctactgacagttttcaaatattagccagttgctgattttaaaaataactgtgagaaaggaagaccaaggtgagaagagactaaaaatcaaacagtcacatgaggttttgtatcttcagacagctgaagaaacccgacaacctacaaagatatgatatttgcttgggtagttgtagttcaggtgtttccttgtgcaccgagcccctagtgcattgctcataataggttctggggcagaggtacctgctcatagctccacagggtcataagcaactttgaacacccccaggagccttgttgttgggcgtggtgggaaatgttaattggcctctgagtgaactaggaggtactgttaggattcttatcccttgataaacttactccctgtggccgtcttgttaatatttaaaagtaaagtgtaaatccattacaggacaccataatttaatatttgttgcatttctgagctatgtggttgccagcatagggtcagtatcctaaggcctttgagttttctgagttttaactctcagcttgactgtggggtgtgtgggcttgggaattgacttttgtttgagagtaacagcaatcttaggaattagtgatttttttggtccttgcaaatgttactgaacacacggaacaagccagccaccaggctgctcgtggaaggggaagggaggcaaagttgggtttggtccccctcccctgctcttatcccctccactcccttttcttcctgagctcatgcttttgttgtgatagattatttttcccgggattttttgcttttgaaatcttagtttttgtgtctttgcacctagccagtaggagcagcattgtctgagatcttagcaggttccagagaactgtccattgtgggtagagttgggagtggcaagaactgaaattccagaggcaggagccaggttttatggacttttctgagtcatactaagcatgaggaatttggaccttgaaagtggtggaaagccattgagagacaacaggaggatatatttatcatttcttttagttcacctatgacattataggacgttataggtaaagactaaatgcaattctttttcttcttcttcttcttttttttttttaatagggatggggtctcgctatgtttcccaggctggtctggtctctgtaactactgggctcaagtgatcctcccacctcggtctcctgtgcctcccttccccttccatgagcagtcctgcggctggcttattcagtaacatttgcagactcactaaaaaaagttactaattcctgggattttgtaattccaaagtgttgggattacaggcatgagccaccacacccgaccctaaatgcagttcttgattccaaagactaaagaatactttacgggcatagaaaaaccctgcagtgctttaacttcttatgtgaacattgctagggtctttattccctctgtaacaattcctggcccatttacaggatttttaatattagtatactttgatttaggtttagttggcaatctagatacatcccaaaccaaacttttcccacatcttttttttttttttttttgagatggagtcttgctctgtcgcccaggctggagtgcagtgacacagtctcggctcactgcaagctctgcctcagcctcccgagtagctgggactacaggcacctgccaccacacctggctaatttttttttttttttttttttttttgtatttttaatagagatgggatttcactgtgttagccaggatggtctaaatctcctgacctcgtgatccgcccacctcggcctcccaaagtggtgggattacaggcgtgaaccaccatgcctggcccccagaactttttattatgaaaaaattcaaacttacagaaaagttgcaagaataacacaataaaagcattatcttccatctggagtcaacagttaccactattttgctttttttgtttgaactgtggctctgctttctccactgagccacgttaaattgttgataattatccaggcagttaacctttaaatacttcagcacacatctctttaaaaaatgacattctcctgtttaatcaaagtactattattgcatctaagaaaattaacagtactttcataatcttttcaatacttgatcttagccagaaggccgagaagtgatcataatactttctaatatccagtcctcatccagtggtgctcagaatgttatttgtagctgcccccatccccaaaataacatattacatttggttatgtctgttagtctttagtagctttctcaccccatccactgctcattgtagtaactctttgagaaagagttcaggccagtattattgcatgtcctacattctggaattgcctagtgtcactttgatgtgttccctagttttctggttgtttttttttttgagttggagtctctctttgtcacccaggctggggtgcagtggcacgatctcggcttgctgcaatctctgcctcctgggttcaagcgattctcctgtctcagcctcctgagtagctgggattacaggcatccaccaccacgcccagctaatttttgtatttttagtagagatggggtttcaccatgttggccaggctggtctcgaactcctgaccttgtgatccgcctgcctcggcttcccaaagtgctgggattacaggtgtgagccactgcgcctggccaatccactgtatttttgtaaaccagaagataagtctaagagcttgattcgatttaaattaaaagtttttggcaagaatactcagaaggtaatcttagtttgttctagttggtgataacccagtttgggcacttggttaagtgatacctatctgatctctccattgtaaatgcacgtttccccctttgcagttatgtgatctgtgggaagaatttgtttttgattttctttccaaagtgtagccttacaagatttgttttttgtttgttttttttctggtttgttttcttttttaaatccaagcctttgcggaggtcgaggccaagccacccaccttggcttctcaaagggcttggattataggtgtgagccaccttgcctgactccttacaagtttccatcaatcatgctcttccaacgtgcctttgtagagtaggttggcccttctgtttctgtggacttgggtcttgaattgctttaaaatgtgaacattacttagctaaagaaagaaaagtttatgtctgatcaagtgacagagtctgtctgtcataatagatgacagaaaaataatccagcattctgcatggcccagagaacccgtttctaggactacaagttgatatatgcaaaagacaagccatctggaggagaggaagggtttcattacccacaaggtgttaaggaaagactttgttttgctaagtgtgtgtgccttagaagctagaaattttcaagtgctttctctggcatcttttgcctttttatggaaagcatggctctgatttcctatgtttgacagtttgggtgttaataccagttggaatgctgccttcttggaagcacttaaattcccaacgagtagataacccattagtctgttacaagcttccaggctaacaataatgtgattaaaatatattatccccataggacatgaagaataatctttccaaaagagaatcaggagggagaccaaagaacagtatgtggaagaatatgtttggatggtaggctagatagaggaaacttgcttgatgaagttaaagctagaagcaccaagagctttaggatcattatgaatcatttggggtaggataatttgggggtagaataacagtttgagattaggggaattattagggtctggagcaatgaagaggggaggaatctcttactaaggcagaaggttgtgtttttgtgcttcccccgaccccatacaaaaatttattgattattgttttaaaaaaaatgaaaagaaaaagaccctgcccaaaggcagcattcctaaagggtgctcataaagtagatgctgtgtgaaaaggggttctcagtaactttggaaactttgaaattttgggtcagttgatttaaacagatttggttactgcagtttttcactagtggaacagagaacctccttatcttacagggttctgatgttcatggaaatgttgcattgtaacaaagaaaagacaacccagatgacctgtaattctgccacacagagataaaaaacactgaacatcttgataagtgatttctaaaactgttctaggcttatattttcctttgtgtctttaacacaaatgtgatatactgtatgtagtatatatacaatgtatatacagtcttgaatcaatagcttcatctctgcttttattactgctcctagcgtaaattatttagcacaaatgcagacataatctcagaaaattattattttttgagacagagtctcactctgtcactcaggctggagtgtagtggcatgatttcaactcaccacaacctctgcttcccaagttcaagtgatccacctcagcctcctgagtagctggggttacaggcatgcaccaccacacccggttaatttttgtattttttgtagagatggggtttcgccatgttgaccaggctgatcttgaactcctgacctcaggtgatccgcccaccttggcctcccaaagtgctgggattataggcatgagccaccgtgcctggcctgcacggtatgatttttaaatagtgagtacttctaaaacaataatcattatttcagtgatagctgagttagtcatggtctgattttgccataattttttttccagacccttttggtgcatagataggttggagttttgcttttataagtagcactgagataaacagtattgaacacatttgttatttatccaattatttctttaggatgaatacctgaaagtaggaactactgggttagagtatgaacatttcactttgatctgtattgccaacctctctagaggttatatcaatttgtttccatcaacaaggtgtgggatacctgttccaccaaagcctctgaatgttggtgaggctttggtagaacaggtatcagtcttttgactcatttagacaagcagtttgtagtgtcaacttaaaattttacgttacatgtttgcaaagggttagaagaaacttagttgtaggcagatagcagttcagtgttgaagaaattcaactttttgctatagaattgcattcttttaaaccctcactcaatcagacaccatgatgcatgcctgtagtcccagctgcttgggagctaaggcatgaagatctcttaagctcaggaatttgagaccagcctgggcaacatagtaagaccctgtctcaaaaaaataaatcattactgttgtaaagaacattggtaaaacagaaggaaaaaaggtcatctcacatcactgttactccctaacagcaaagcaggttggtaaatttgcctcaagtctgttttagcctgatgcatgttcttattccttagcaatagttgtcaagatatagcagaacttttttcatgttgttaaaaatgtgatagtctatgctaaatattatacataaggtgtatggtgataaggttgcatagttttcacttttaaagatgtgtaagattccgtcaagttttgtgtcacagtttatgtgctgttgttttagtaagtgaaagcaagtttattagagaagaaaagaaactggctactccacaggcagagcagcactgagagctgctggttgttgattttgagttgtttcccaagattttgcttttagaaataatgtaagtaaaaactttgtgcatagaatagcctcatatttaggatactttgctagctcagaaggtatgagcatttttatggctattgttgaatttgcaaatagttttcccaaagggttataccagtctgcacgaacaccagcacagttggtgaagtatcagtttcactatgaccttttctggcttatagcctttttttttgtggttgcagaaaaaccagtatacttctaccttaaaaaagcaaggcaactcctccggctatcacagcatctgtgtgccaagctataattctttttttttttttttttgaggtggagtttcgctcttgttgcccaggctggagtgcaatggcgcgatcttagctcactgcaacatccgcctcccaggttcaagtgattctcctttctcagcctcccgagtaactgggattacaggcatgcaccaccatgctcggctgattttgtatttttagtagagacggtgtttctccatgttggtcaggttggttgcgaactcctgacctcaggtgatccacctgcctcagcctcccaaagtgctgggattacaggtgtgagcaaccacgcccagcctatgtaattctttaataaatagctaaatgcctactatttatcagaagttgatgaagaaaagaataagactgtctgtactcttaaggagcttacagtctattggaagagagagacatgctcaaatttgtagaggtcatggatagaagttggtgtatcagttgagaaagagcccaaagataggtgtaggcagttctaatcttgggggtgggatgataccaggaaaagctaggaaagggacattaaagcttagtattggctgggcatgatggctctcacatgtaatcccagcagtttgggaggctgaggcaggaggattgcttgagcccaggagtttgagaccagcctgggcaacaaagtgagattctacctctacaaaaataaaaaaattcaccagatgtggtggtgtacgcctgtggtcccagctacacaggaggctgaggcaggaggattgcttgagccaaggaagttgaggttgcagtgagctgtgtttgtgccactgcaatccagcctgggtgacaggacgagacactgtctaaaaaaaaagcttagtatgagcgggtgtcacaaaagcacgttcatacagaggaggtgtcagtgggggtgggaggctggaaccacaaggcaattcagggacagggattggtcggtggagtgggggcggtgacggacagagattaggacgagggggtgcggaggtgaggggagcagagcctttgttctggtttcagttccacagaggagtgtggcagtgctggtcttgtgcctctagcacattcccatcagcaacatccgtcataccctgacgccccccccacccccacccattctccgcagggttgttttgataagtgtacgtgttcagtttcaatggaaccagcaagataatttacagttttctcccacccaagcttatactgaggttatgtggctgtgcatgtggatattggtacttctgagggttgataactggtcatgctattaagaattttgggggaagcaaagctgaagcttagatcagtaaagtacttaccataggctacccagccatctagtatctgtttagacagcattttcatgtctaatcttatgtacagtttaataatttaacagatggtagactaataggtcagtggaaatgtttatagggtacttcatagctgttaatttttaccacttggatttttttaatagctaggaatagtaattagggtgaaaaatgaaacctacgaatgactttgtgatttttctgcctcaaatgagaaggattaggaaagcaaaagtttcctcaaatcaatttttcccccaaaatatttttttgtattatttactttgttaatgtgtgtatgtgtcccccctcctcccagttctctttaaacactttttgtatgaaaattgtcacacggttgctccaaaatatttaaatagataagacaatgggtgtaaattttgctgccaaaaattccttgtatcttaaaaaagctgtattttctctcttaaatgtatgttaatgtatgtaatgcatagtatgagtatccagcattttaagcagatttaaaatggaaaaattcatgattcacattagagcttcaaacttataaaatttgggggatgcattatagcgtgagtattggcacccactcctgaagtggaatattggaagcctgaaatatatgacatgttgacagtaaagatccaggtaatattggccatgcggggtggctcacacctataatcccagcactttgggaggccaaagtgtgaggactgcttgagccagggaggttaagactgcagtgagccatgatcgtgccactgcactccagcctgagtgacagagcaagatcctgtcaaaaacaacaacaggccgggcgcggtggctcacacctgtaatcccagcactttgggaggccaaggcgggtggatcacaaggtcaggagatcgagaccatcctggctgacacagtgaaaccccgtctctactaaaaatacaaaaaaaattagccgggcgaggtggcaggcacctgtagtcccagctactcgggaggctgaggcaggagaatggcgtgaacccctggggggcgcagcctgcagtgagctgagatcgcgccactgcactccagcctgggtgacagcgagagtccgtctcaaaaaaaaaacaacaacacaagccaaaaaaaaaaaaacacttcaaaaagatccaagtaaaaggaatcaaacaaagtgtgggcagcatagtagctgtggattcaggggattgagcatctgagaggcagtagagcatgtttgttaaaaatctggactctggagacaaagcctgctgtgaaatcttggctccacatggtcagattgcgtattcagacctgagtttttttcatctctaaattgatggtaacaacctgcctctcagttattgtgaggatgaaatgagataaaacacaggcatttggaaaggtgctggcacataaggactcaataaatgcattattagttgtataggaatccatctctttataagcagaataagcagattctttctttacctgttgtgcagagcagtgaacactgatcatctgcttgtttaggggtaaggttgaattatttttcaggttgtgctttttccacaaaatattggtctaaaaagataatgcaggttttgcagatactctagcatggcagaaatcaaacttcaacattcctttggcacattttgtttttccttaatttttattgtgtcttatctgtgtattttgtatatgggggaaggagagagcactagcaagcatgagcgtgagagggagcctcctgttctatttattcattttctgcttctcttctctttagattctcttcccttttccctgttctttatgccaaaagcatggacatgctaaagaggtagaacctgtgatccatagattggctccagtgtttttctggaatttatttgactctgttataaatcccacattttatagtgggatgatgatgtgagtaaattcagagaaagaaaacccagtctaacagacccccctgagcaccaagcagcacctttgctgagtgtcattctttctggctctggtcagttgtgtctagctttatatcttgacattttccctccactctacatgccatggagatgtggtgttcctctgcattgctccatgtagaaagtacagtctttgctaagattcaggctcccaacttttattaatcacctgggggattctacacacagaatcttatttagttcatctaagaatttagatgtggatactaaaaagttcagtccttaatctggagccaggaattttgagtagggtaaatttacttgttccgattgatacctactcattggcccactggaaatccaatcctggaccgtttctgcaatgtcgtggctttcagaatcaagttcagaccccaagtatagtgcgtgaagccctttcgctcttgctccccccatttttctagcctcccgtctcatgttcttgccatatgcaaccttcgctccagccatatgaaacttctttgattcctcagatgtatttccccctggatggctctttgttttcatttatgctgctccctctcctgcttcagtgctcttctttcaggaccatactctagaattacctcttctgagagtattttcctggcccctgctcccaatatgatctagtagccactctcctgtacccctgaacaaacgtgactattcttccattgcaaggtgatggcagggactgtgtcttacttgtatctctttatctttagagtatagggcagtcctggaacatcttatgtatataatgagtgttgaatgaatgtatgtctgaattacagtttgtaacatttataaaagaattcatcatctctttgtagctggtgttttatagaagtgtaaaaagtccttaggacttgatgtttcttcattattattattattattattattattattattattattattactactacccccccaccccccctttttgagagacagggtcttgctgtgttacccaggctggagtgcagtgacatgatcataactcactgcagctcaaactcctgagctcgaaggattcttctaccttggcctcccaagtagcttgggagtacgccatcatgcccagctgatttttaaatttttttgtagagacagagcctcactaggaacagcccaggctgttctcaaactcctagcctcaagtgatcctcctgcttaggcctcccaaactgctgggattacaggcatgagccactgtgcccagctctgtttcttcattaaataaagttgggaacttggccactcctggagagtaagtggccactttacttttccccttttggagaaagcttgaagtccagcagaacagtaagccacttaacctggcagttgcaacacattaattaacaaccttttatttttcttttggaaaaaaattgcaaatctgtagagacattgagaaaatagtacaataaatatatgctctacacctgagttcaccagttggtagcattttgtcacatttgctttaactttttatatgcatacataagctcatacatgcatatgtgcatatgcacacatttttttcagaagcatttgaaagtaaagttgtagacatcatgatgcgaaacctctaaatacttcaatatacatctcctgagaataagcgcattatgcataatcacagcactatgattacacttaagcttaacatttagtaatatctgatatacattccatgtttaatttttctcacttgtctcaaaaatatctattttagcactctgatttttctattcagaatttagtcaaagttcatgtattgcgtttagttatgtctctaatctagaatagcccctgcttttttttggtccagatcagttattttgtagaatatcctatgttctttcagcctgaagaatctaaagtgtgtgtgtgtgtgtgtgtgtgtgtgtgtgtgtgtgtatttggagacctcatctctaaaaaaatataaatgttagctctgtgtgtgggggcattccgctgtggtcccagctcctcctgaggctgagttgggaggatcacttgagcccaggagttggaggcttcagtgagccatgttcatgccactgcactccaacctgggtgacagagtgagatcccaactcttaagggatattctagatttatcttcttgttttctcttcagtagattagcaagaatattatataggaagtaaatatcttacattgcattaggagcctggaactgtaggttgttctaatattggggttgctgagttgagacatttggtaaagggatgacctgctagatcttcctcttatgcagcaaaattacaaatgtcagttgtgatcaacatgtaatttgtggggtggtgcattgaatatgtgttttgactatcctcttcaacaaccctttcacctgagggttttagcatccattgatttccatgtcatgattatgacccaaatatgactgtaatcaacagacctgctaaacagagttccagattctttacggttctttttgtccttacagtatatctctcaaagaatgtatcggagtacttttccgttggttgtgttttcagtacaatgtattattagaattatttgtttgtgtttgtatttagttttagggtttgcccatttttcatatatatatatatatatatatatatatatgtatatattttttttttttttttcttgagatgaattctcactatgttgctctggctggacttaaactcctgggctcaagccagcctcctacttcagcctcccaagcagctgggaccataggtgtgtgccaccatgcccagctagataatttttttaatacgtaaatgtccaaaatataaaaggtgtactcaggcctcagtcctaccccttcatttttattagtttctggtttactcttcctatgtttttttttttgtaaaaatatgtgagtgcatatcaatttccctttattaagtagcataatatgtcttggaagtcaattcatgggttttgctcaccttatttttggggaaggtaaattttgttgacatataacattaaaatgtgtacatgtaagcaaaaagcttggtgaatgtttagaaaatgaatatatctgaataaccagcatccaggttaagaaataagatgaccagaagccaccttcaactctcctgcactccagggtagccattctcctgacttttatgttgtagattagctgtgcctgtttttgtattttatctacatggaatcataccacatgtgttcttttgtgtctggcttctttgtgtcacataaagtgtgagagattcattcacgtgggtgcatgcagttctagtttatttattcctgttgctgtatagtattccaaaatcggaataggctacaaatatttaatctcttctgagttctttctagttttggactataacaaatgttttctcattcttttttatggtctcatggtactcatccatgggagtgagtataaaaatgtattcaaccagtctcctttggatggtcatttaggcttttttccctagtgtttttctactacaaatattattgcacaagattttgaataaacttgtgcattatagtatggaacatgtttttaaaagctttatgaggaatgagagtaacagaacattttggggggaaagctaatctttttggcagtgctgctcaattggtggaaaggaatgactgagcttttcttaggaacaggttagtgcagtaaaactggttaacttacagtattttgggttcctctcagaaaggaggagggggctaatgcaaaataaagagaagggcttgaaatccatctccatgcctcctggagcacagccaagttcagaaaactctatattgtctcaacttattattattattttttaaattcagatatttattatgcatcctctgtgttcccaacacaccattctagccactgggggtacagcattaaaggaagtaggcaacagccttgccctaatggagctcacattcttatgggggacaagataaattttaaaatatgttgtatgttaagtagaaaaccaaagcagaggagggtgattggtgtttgggtgtgagtgtgtgtgtgttgtatgtttgcatatgttgggggtgagatacagattgtaaaaagtggtcaggaagggaatggtttcttttctggttctgaaccctcttttagcttaccaagccaaccacagcaaacattaaggatacacattaaggttcagtgagaaaggaggaggttttcctgttagaatcagaagcagagaggaagaaaggcaccattgtgtggccaagaggtggctgaagggcaggaaacccagtccttcgcccccggaagctgtccagttaagccatggcccaaggctgctaacactggcatctgaatggaaatttctaattgtgtagacctgaatggggcttatttttctcaactgaattatggttatatataagagatccctcctcctagatatgaggctggataataattacattgtctcatgaaagtgtaaaacaaattattagtaagtgtgaatttgtgttaaatgttgtcgcatttaccacactgcattgtaatttgttgaattttgtctatacattactcatctattcagcgttgccttatgcatacttggcctccagtgccctcgtacggtgcctgaaaagcacacagtgaaggaggtgctcagtagagactcgttgaaactggaggatttaaccactgcacaccaacttaaaattgttttttttaactgtgattcagccactgttgcgcaggaccatattattagaaagtactgctttcagaattttcaaagttagctgggtgcggtggctcacgtctgtaatcccaacactttgggaggccaaggcaggcagatcacctgaggtcaggagttcaagaccagtctggccaacatggtgaaaccccatctctaccaaaatacaaaaaattagctgggcatgatggcaggtgcctgtaatcccggctactcaggaggctgaggcagaagaatcgcttgaacctgggaaatggaggttgcagtgagccgagacgcgccactacactccagcttgggcgacagagggagactctatctccaaaaaacaaaaagaaaaaaacaaagtaaagctcatcaaaatatatgcagcaactcagttcacctctctggttttgatttctctaaccatatgaccttgggcaaattaccccctggaggacttgacttcctaatctaaaataaacactcaagatgatatctacttcacagagatgtgaattttgaatgagataatttagattgaaagcaacatgtgtatgcatatgtacttcctactttaggccagagccatggcctaagtttattaacaagactgctttttttgttgttgttaaccaaacagcatctcactgttgcccaggctggagtgcagtggcacgatcatggttcactgcagccttgatctgagtgagtggctgggactacaggcgcacactaccacactcggctagtatttttaaaatctatttttgtagagacgggattttgctgtattgcccagctggtcttgaactcctggcctcaagtgatcctcttgcctccgactcccaaagtgctgggattacagatgtgagccactgcgcccaaccggtaacaagacttttaatagagacacctgaaaggtcctacagtttgatttgtataaccaactacatgagcattgcacaggagaagggcaatttagcatctctaaaaagattaaggggattttgcttctagcaagcttgatatgaattagtaataggatgtgactgctgtttaccaacaacattcagcaaagattgattgattgattacctaaccatgtaatggacgtttaaaaagtctattcatagaaatatccaaaactgaatttcccaaagtaagttctgcagagactcacttgatgttctggtttgggaaatggcaggctaaataactaaacatctctcttctgggaatttctgggccttgagttattgtgcattgtgaatctccaaaaaggggcttgcttttacagatctttggtaacaggtggaacagggctgctggtggtttgtgtgtttctaggctcatcctattgcatctggacaactccgttagtgtggtcacaactctttgtcaagtgtagacaactgggccagtatgcagagagcgcagcctggatggggagtgaggttgtgatgatgaagttgtgatgatgaagatgtgaagttgtgtgaagttgtgatatgggaggggcacacatagaaggggcctgagtgggagagggtgtctggggaaggttgagagagaaccagtgggcaaaagtgactgggccagcctggccaacatgctgaaaccccgtctctatgaaaaatacaaaaattagccaggcatggtggcatgcacctgtagtagtcccagctacttgggaggctgaggtatgagaatcacttgaacccgggaggtggaggtgcagtgagccaagactgagactctgtctcaaaaaaaaaaaagaaaaaaagaaaaaacaagtgactgggaaacattttgtacccaaccaaagtaggttttctttgctgatggccatattttccctgttgactctgtgttcttggaggtcatagttccccagtagtgggaagcattcgatgatattggtgagtgttccttaaaatgccatccaatcccaagttgtggatttgtgattatttccttttgtttggcaatctttactccctcagtttttatttttttagcattgtgctagttcctttcgataattagaaaaaaaaatactatgtggtttacgttaatttattagttgaatgacgagactaacacgagacagttgttagtgaattaagtcaacatggaaacaaatccaagttttgatagtctgtaatagaccatcacagaaactggagaaggggggagactgacacggtactgaaagcttcctcaagaggtctgtgaactggggtttgaaggattaatgggatttgcacggcagaaagaatagaccccttgctgtagcagcagctcagggataaaggcaagagacgtaaaagacttttgagcagtaacagtgtggataaatctgtaattaagaaaggtcaagaaagatccatctggcagctttgtgcaggagatgaagatgtgagagctgtctccttaagagtaagcatttaagccatgtgggtgcttgaaatctttcagagagaggttgtggctagaacatggatgagtgaggtataaaagcttagtggttaagagcacagacacacctggttcaaattctagtgctctcagttgacctttgtgaagatacttggagaaactgaagcctagaagttgtttgtaaattggatagtattacttgcctcttaggataattatgaggattaaatgcagtaaggaattatgtaattaagtactcaataaatgttgcttatatttattatgtggccagagttccctagagcagtggttatagaagtgtggtccttagtccagcaccatttatcacctgcgagcttgttacaagtgcacattcatgggccccactcagaccagatgcatcagtctgggtagtgggacctaggaaacaggcttcttaaaagcactctgggggatgggtgggaaacattagagaatgactgccctagaggaatcctccagttgggatgcaaagctaagaaagggagagtgtttaaaggaggggctaagcaactgtgtcctttgcagtgcagaggaaaggaggtagtgagttcttggcggcaccttactataagctttacacaagattttcaataaatacaataaaagctttacacaaaattttcaataagacaactggtttagtaatatgttgggatgaaaggaagatttcagggcagtgggaacatactgcacagcccaaatgattaaaaacaacaacaacaacacaggactgaattagaaatgtgatattagatgaagtttaagtcttaggtttaacaagtatttgtggactgcccccctactgtgactggcagtgtcctatctgctggaaatagagaatgaggtgttactcctgctttcagagacttcacacagttatacttttttttaataattggaagctgtcttttttccttaaaatctttcctagctactagagaataaacacaatatctgatctattctccgacggtgccagaagttaagcatagggctgtctcccaatcaatgcaaggccgcatttgaaactgctccctcatttcggaaagcattctgaacactggtcctttttgcttattattttatggcttgggatataccttaagagatgatttgaaatctttcgaaagatttcaatgtccctgtttaatgttggccacgtggggtttttgacattatgctaacccaccccacctctgtcattcccagtataaagcaccaaaagcactagcttgaaatacagtgacttctaagcttcgtccattattccattcagtcattgtttgctgcgcattatgtacaggatactgctttaatagtgatgaaacctaatgtcagccaagtgttttgtcaaagagccggaatccacatcccaaggccagatgtattgagtgtggaggaggcactggggcctggtcccgaggttagccaagcggttagatgaatccacccccagacacccacaaagtttagatttgtaaatgttccacccctgtaacacatccccctttcacaatgacaaaggcaatttgagggaattagagtgactggttaagaaactatgttttacaatctcactgtttcttgaaaatagatggcatagcagtggagtttgcaagtagaatatagggattacattttgacgtgtttgtgagcttctagttttgtatcatagagagacttcaggaaaatgcaagtggagatcactttccaaagaagacaagattggcaggttaatctgaacactcatttgttaagagcatgttttaattgaccttggactgtgctctttccctattgctttggacttttgggctgggatgggtggatagtgaggactgcaaatagtctttcgttactcctttttctttccaaatctcccaagggtaagtgattggagcctcagtctaccactttgaaaaggttgccaagaccagaccgtggcttcagaccatggcttcagtgcttctagcagtcagagagtcagtggtttcttttctctatgaagaaccatgaactaattctgagaaggtgaacttaaagagagcagaaacctttaaaaaaaaaaagttttaactaattcataaaggtctttcttctgatgatcagagtgctagaatacagattgggtatttggagaagagatggaatatatttttttttaagttgatgctttttctagaactgctggatattgacagaaattcctctaagctctactagctacccaaaagatgttggtgtcctgaaaggtatggaaaatagagttatggtcatgtagggttttaaaagaactaaaagaggctttaaaagtccaaaaagaaaaaaaaatccatagctatgtggtgtgtttttttaaatgattgcttctgaatccacctctttttcccctttttgctttctgcagtgaacacctacctcttcatgatgcaagcccaaggcattctgatccgggacaacgtgagaacaatcggtgctcaggtttatgagcaggtgcttcggagtgcttatgccaagaggaacagcagtgtaaatgactcaggtatatttttagtaaagaggtggtctgattagaatgtctcctcccaagagaggtaaattcggttgcaataattattttcaatgggaaaagcgcattgtaaaagagggatttggctgagttttactttactgctaaaaaagctcttgccaaatgaatcctcgttcatttttgttaacaatatgactcagtctgtttgtgttgctataaaagagtacttgaggttggataatttacaaagaaaaaggatttatttggcttatggttctgcagactattcaagaagtgtgatgccagcgtctgcttctggtgagggcctcaggctgcttccactcttggtggaaggggaaggggaagcctgtgtgtatggtgagaggaagcaatgtggcaggtgagaggagggcagggccaggctcttcttaacaaccagctcttgtgggagctaatagaggagaacctaccgcaacagcagcaagccatttgtgagggatctgcccctgtgaaccaaacacctcctgtaggccccacctccatcattggggattacatttcagcatgaggtgtgcaggggacagacatttaaactatagcataatacattaagagtgactggatgactacttctttttttttttttttttgagacggagttttgctcctgtcatccaggctggcatgcaacgggtgatttcggctcactgcaacctccacttccccagttcaagtgatactcgtgcctcagcctcctgagtagctgggattacaggagcatgccaccatgcctggctaatttttgtatttttagtagagatggggtttcaccatgttggccatgttggtcttgaactcctgacctcaagtgatctgcctgcctcggcctcccaaagtgctgggactacaggcataagccactgtgccagggctctttcttttcaactctttcaaaaactgaatacaggaaggaagtaatacttccacatgattaagtgggactctcttgaggcctctctagtccagccagggatggtttttatttaaaaaatagattctgagatttcatcttactaaggattcatgattcgcctcatttctgtaactgaggactaatgtgctttctgggtttgtttgggtttttttgagatggagttttgctcttgtcacccaggctggagtgcagtggtgttaatctcggctcactgtaacctccacctcccgggttcaactgattctcctgcctcagcctcccgagtagctggggttacaggtgtgcgccaccatacctggctaacttttgtatttttagtagagacggggtttcgccatgttggccgggctggtctcaaactcctgacctcaggtgatccgcctgcctcggcctcccaaagtgttgggattacagacatgaaccactgtgcccgagcttttttttttattctcttgagatggcatctaagtttgtctcccaggctggagtgcaatggcatgatcttggctcactgcagccttgacctcccaggctcaagtgattctcctgcctcgtcctcccaaagtgctaggattaaaggtgtgagccaccgtggctcattttttgtattgtttgtagacatggctaatttttgtattttttgtagacacggctttcaccatgttgcccagtctggtcttgtactcctgagcttaagcgatccacctgccttggcctcccgaagtgctaagattataggcatgagccaccatacccagcctcctatggcttcttaatgatttcgtctaagcccaatattttaaaatacttacatttaaaaaaaaattctccctctaaatcagtcctctcttcttctctaataagttacaagatttttggaagttcactgtcgaatgtgaaattgctttgcaaatgttgcaaatgcgaattattctgtggcgcttagaaaatcaagagaaagcattgcctctcttaaaagaattgcctctccttaaaagaattgaccacatcctaatttatcagtttcctttgccgtccactttagcaacagaggactgtagttagcaaactgataaacttttgatactttcttgttggcaaagaacaagtgaatgacatttcagagctttttagacaaattgtggtcgcactgggtcaagttacctgagctctgaaccatacctgggagaggaaaccctgcagtttccgtcttgcatgtggtggtaggttttgcacaatccgcacacacattctcactcgactcatgtggctctgtcagttaaggcagaattttatgctgtttgcatttttcacacatagtacatataatcttggggaagatggcgcagcttgatcatgtgactctttccctaaaccctgccaaaatcctgcttctagttaggtgaagaaacgaggcagtactgactgcccttccagagcgctctcccctgtatagcactgagtaagggaacatttgtgtcctcatgacatttatccagtccagatgtcatacttctgcagtgttagatgaggctggaatatctgtctctctgggcatttggcagtactggcagttctctcagaagttagaggggcatgcagcaggaccccatttccacaccactgccggtctggcaacacaggattgcgctacttcctgagttgctgtctttgaaaactgagtacagaggtgagtttcacccttggagggtgtatccagtgacccgttattattgaacttggtgtacttttattctcaaattatcatacacccaaataccttttccttgcatctctctggttagaacaatctattttttgttaaacgtgtttatttctctaatagattggaagtctgtgccatcagggactctcttactgtttattagatacttgacttacatgatttcatgtagtccctcacaagaacccagaaggtagctactgtgtccccattgtagggataaaaggaacaaggcacatggaagtcatggaacttgatgcagcagcagggttagggtttgctgattctctgactccagggcctgtgccctgaatcgcagtaatggcttcattccttttgtcatctttgtatccttagtaccttatacactgcctcgcacataggaagcacttggtaagttatttttgtatgcatgaaggaatgaatttaacaagaaagcacgtcttaagtgttgtagcatgtttctaaggaggtcaccatcttgtggagctgctgtgtcactggcacatctttggcgagtaagtacaggttgagcatccccaatcagaaaataccaactccagactgctccagaatccacacatgatgaaaccttgagtgccaacacgacacttgaaaaaaatactcaatggagcattgcagatttcggatttttagattggggttgatcaactggtaagtataatgcagatattccaaaatcctaaaaaatcagaaatctgaaacacttctggtcctaagcatttcagataaggggatactcaacctgtactgaaaagaaaatagcatttcactgaaagtgtatttaatgaaaacccatcattcttcttcatttcaaagcagttgtctacctagcacagtcagagagggtattctgggcccagcactgctgagacagccaaatgactgacacctctggcccgaccacttctgcctggagcactgttggcttaatggtggtaacctggattatgcaccatcctctgctgaaataatgctgaggcacatacccacattcaggcatctgcattaggccaagcatagctcaaaagcccagggtgacatttaagtcatgctggttttctttaagtttaaaagcaacatggtgattagtgaatgaaaacagacttttggggatggggtctgtgaacctggaaataaacctgaagtggtgaccaggagaagcttcctgttgtcactgaaagccattggtttgtgagattgtgaatctgcagagtgagtaaagtcatgctggtgtgctttgtaatctattaatggagtgggtcatcttcacctctttctcggtggttttagatgtccagtctgtagtcttcgatgtggctaccctcccagtaggtagtcatcctttaatggactaactcttgaagaatgctaattctttatatttcacagatatttgtcccagtggcatctttctagtatatataaatttccatatttttttcaagcagagaggcaagtgtttggtcttttctcaaatgggaggggaaagtggtgattcttgctggggtccattggtcagcactttcgattccttctcaactggatttggtaacacaagggagaaggcaggtttttacctcctccaggtattagggtagcaataccaagcttagctatacattggaattcccaaggacgtttccaaagtactgatgtctgtgcctgactgctagcgattcttatttaattggcctgaggtatagcctgaatgttagaattttgtttgtttgtttttgttttgagacagtcttgctctgtcacccaggctggactgcagtggcaccatctcagctcactgcaacctccgcctcctagattcaagtgattctcctgcctcaacctcctgagtagctgggacaccaggtgggtgccaccacccccggctaatttttgtatttttagtagagatgaggtttcatcatgttgcccaggctggtctgaaactcctggcttcaagtgatctgctcacctcggcctcccaaagtgctgggattacaggcatgagccaccacacccggcctggtgttaggatttttgaaagcttcttagatgattccaatgtgcaaccaaggctgctgaaccactggtgtgaagcaatgctgaataagcagttgctgttggacagaaatgttggtctgcaagcccatgatatcagtagccatttgaacctgtaggtaggagtctgttgttttcccattttctatctatctatcttcttttttttttttgagacggagtctcgctctgttgcccaggccggagtgcagtggcacgatcttggcttgctgcaacctctgcctcccaggttcaagcgattctcctacctcagcctcctgagtagctgggattacaggtacccaccaccatgcctggctaatttttgtatttttagtagagatagggtttcactatgttggccaggctggtctcaaactcctgaactcaggtgatccacctgccttggcctctcaaagtgctgggattacagatgtgagccactgtgcctggcctgttttcccattttcttttttgagacaaagtctcgctctgttgcccgggctggagtgcagtggcgggatctcggctcactgcagcctccaccttttgagttcaagcaattctcctgcctcagcctcctgagtagccggagctacaggcgcatgccaccgtgcctggctaattttttgtatttttagtaagagacacagtttcaccatgttggtcaggctggtctcgaactcctgaccttgggtgatccatccgccttggcctcccaaaatgcagagatcaccgcgcccggcttgtttttccattttctaaatgtaaaagcagctgccttctttgcccttcaagaacatgtccaggtttgaaatagattagatttaaattaaaaagtaaaactgtggctgtagaaattcaacaggcttgtttttctctcagcattttcctcattcagtaggtacatgctttagaagagtaagaagttatatttggaactccaaggggataaggtataaccccacccgttgctggacagctagcaggggagaaaaacaagggctcctcacgataactgcacatagttttaccaggtcgtgagcaattaatttcctctgtctctttcattttaaaaggcctctattgctactgaaaagcagactttgtttgtttgtttgtttatgatggagttttgctgttgttgcccaggctggagtgcaaccgtgtgatctcagctcactgtaacctctgcctcctgggttcaagcgattctccttcctcagcctcctgagtagctgagattacaagtacctgccaccatgcccggctaatttttgtgttttttttttttttttttttagcagagatggggtttcaccatattggccaggctgatctcgaactcctgacctcaagtgagcaccccaccttggccttccaagtagactttattttaattaaagttttatttaaaaatttttaaacaagaaatcaggaaattaagccacccctcccaagatgtagagtaagtttctggaagatttttgcaatagagttgttgtgtatttgaggattcttaaaacagtgacatattattaatttagtaatcagaagaaaaataaatgctttttttttgtttcatgctaggtgctaccaggcttactgtatcattgtttgaaggaagtagaaaggaatttatctatcttcaaagaaactccaaatagtagaatcattagagttagtgatatcttgtctcttgcctcatgttttttaaattctagtttcctgattaggttctagctctagggcttgggtcagtcattgaccagaatgattattatcttcgtttttgttgatttgtttatgaaaatatacttagtgtaatacttttgggaatttcattgccttctagtgaatgtattgactgtgccaatacatgtttccagccagcgtctcttgccacacatgggcgtatcacaaacacaggcacattttctattacttgtgaggtcttttaatttttttctaaaggagaataatttcatctattagattcatccagagtaataattaggatgaggggttcttcacatagatttttgaagtagttactaccttcagaagaagattcaacccaggccaggtttgcatgtatgagctgagctcagagaatttctgtgtaaatattatctttaaggttctgtcttggttcatgtttttgtttttgtttttttttaagataggatctcattctgtcacccaggctggagtacagtggtgtgatcattgcccaccggaacctcgacctcccaggctcaggtgatcctcctgcctcagcctcccgagtagctgggaccacaggcgcgcaccaccaggcctggctaatttttaaaattatttgtagagacaggttctcagcatgtttcctgggctggtcttggcctcctgggctcaggcaatcctcttgcctcagtctcccaaagtgctgggattataggcatgagccaccccacccagcctggtttatgtctttatataaattagtctctactattctctataaatgcaggcttagtgtttttcaggaaagctactactgaaaaggacagaaagcattctgttccttcccttgttaagacacagttaaaattttcaagttgcctctcgttgaattttgccccagagtacttgcagagtaggcagcgcagagtaggcagccgtgtgcatatataaaaggattcaatgtgttagccatttgattcttggaaacctgctcatagtgctttttcaaaaatatcttagttgaagattctagaattctagggtacaaagtgaatttgaacaggatgttttaattttcatagaatcagcatggatccaaaaggatttaatattctgtgaaaaaaataaaaacaatacagtatactggaaggatctctcattcagagtttagttggagctctgtcatgcattagccagggctcctggtctgagttctgtgtatgttgttccagttattcatctgtagaaaatgaggttggaggaccctcctcctactctacaagtacagtcccctaggaaaaagacatctgccatcacactcttcatatccactaacgtgactctaaaggggcatacatatgtgagggtttttaaattataaacccttgagaatgagaacacaaaaggagaccacagcaaaaaaccttggtaggtagaaagcagaagaaccactgataaaagacttaacaaacccaagaaaactgactgctcaaagcagcaacaggagaaccagcaaccaccccaggatcccccagaagctcaggaactagcaatatgggaagtaggagcaaaggtggcaactaaaataaagggagattgaaagctgttaaaaagcagtcagatacccagacccatttccccatcctggcaagagctggagacttaataaccccagagatggcaaaacagaggctcctcaacctggggatacctggcatgaccacagtatttgaaaagatggggattacatatgccccagcctctttctcttctttcttagtttcaggatgtttatagtcaggactctaccattctggcaggagattcgagtggatttctctggagaatctggtcagaccaggagaaaagacccaaagatattgacactggagataccaataagagaaaaatgactgcaaacatgaaacaagaatatagtaagaaatgaacattcaggaaacaagagctcttcaaagttaaaaaatatgatagcagagatgatgattaaaggaaggttgagtaaagttgaggaaatctcttggaaagtagggcagataaatggcaagacggaaaactggatagaaaagatgagacagaggactgggaggtctcacatccaactcctgttctgtattctccagaaaggcagcacagagtacagaagggaggaatcatcaccgagagaatacctccccccaagcacatttggcatggaagaaggccagaagctgccacacctcctctgggaggatgaagttgagagaatacctaatgtatgtcttaggaggaaatgtcttggtgaaaggcgtagtgttgaattagaatcattgcatataaaactgagcaaacagaaaaacaagatgcataactttccacatttctcagcgacgactagtacttaacagcagcatcgtaatacaaagactgaagattgtcctaaccacagctatgatatgtgaccgatgggagactggggaatggaaggggatcgtgtggcaggggtggcagaaggaaggggataagtgggaggtcggtaggtaagactgaaaacagaaacatcacgaccagccgtagaggctgacagaggtgaatactgcatataaatgctgagatacttggccaaaagaagggcaagtggttcctttagaaaacagaaatgagaggagggcaactgctgtttttaaaattacatttaattacagttgactgtaaactgagtgctgcatataaacctataaaatcaataggaataggaacactggttaaaatctgccatttggctgacatttttattgatgggttcacatttttagctgcatcaaagcggtagtccagagtcctgtctccttctaccaagatgatagctaagagaaagacttacttggtaggcatctgataattgcacggttgatcacacataccagtctgatcgacttttttcctttacctccctagattatcctcttgacttgaaccacagtgaaaccttcctgcaaactacaacatttcttcctgaagacttcacctactttgcaaaccatacctgccctgaaagactcccttccatgagtgagtacagctctggcctgtcttcctctgcttttaaaatggataaaggggagggcactcttgatctctctgtctgcctgcagagagaatataaatacctccctgccattggaaacagggtttgtgaaagttgtgctcctggctcctcttcaaagcctgctgcaaggttgcctgtgttcttgggtgccattttctacctttcctactttttcactcttccctttgcccttgcctgtcctttgtaacttgggttctgtttgaacttcctagagaaagtatgaatacagtcattcatagcttaacaacgagggtactttctgagaagtacatcattaggtgattttattgttgggagaacctcctagagtaaaattccacaaatctagatggtgtagcctgcgacacccctaggctgtatggtatggcctattgctcctgggctgcaaacctgtgcagcatggtactatacagtaattgtagctcaatggtaagtatttgtgtatctaaacatagaaaaggtacagtaaaaaatgagatataaaagataaaaaatggtacagctgtgtagggcacttaccatgaacggagcctgcaggaatggaagttgctctggtgagtcagtgagtgagtgaacgtggagtgaatgtgaacgtgaaggcctgagacatgactctgcactactgtagactttatgaacactgaacactttggctgcaccaaatttattcagaaaatatttgtctgtctttaatggtagatgaaccttactattatacctttctactttctaaacttgtgaacttgtaaaaagttttaaaaaaaactgcagccttgaactcctgggctcaagcaaccctcttgcctcagcctcctgaggagctaggactacaagtgcctgttgtcaatgcctggctaattttaaaattattattattacttttttaagaaatggggtgttactatgttgcccaggctggtcttgaactcctggcctcaaacaaccctcccacctaggcctgggcaacacgctgcagtgtgccatgatcgtgccactacactccagcctgggcaacaaagcaagaccctgtttcaaaagggtaaaataatgatttaaaaatatagtataataaatatataaaccagtaacatagtttattatcattatctagtataatgtactctacataattgtatgtgctatacttttttatttttgagagggagttttgctcttgttgcccaggctggagtgcagtggtgccgtctccgctcactgcaacctctgcctcccaggttcaagtgattctcctgcctcagcctcccgagtagctgggattataggcatctgccaccacgcctggctaatttttgtatttttagtagagatgggaattcaccatgttggccaggctggtcttgaactcctgacctcaggtgatccgcccacctcagcctctcaaagtgctaggattacaggtgtgagccactgctcccagccttgtgatacacttttatatgactggcaatgcagtagatttgtttataccagcatcaccagaaacacttgagtaacacaacaatgctatggcagctatgtcatcactaggcagtaggaatttttcaactccattgtgatcttatgcaaccaccgtatatgccatccgtcactggtgaaaatgtcaaagcacatcactgtataggcagtcagctttgtctttttagtataaacctctcactgattgtagtgcttgatcttagaggtgggggtctcactatgttgcccaggctggtctccaacttcagggagcaatcgtcctgcctcagcctcctgagaagctgggactacaggcatgagccaccatgccttgcttggaagttattttcttaacaaagtgctagttaaaacaattcttagatctttttgttcttttttttgaatctcgtgtaagctaaaacaaggacagtaaactcttatacctttcctatacttttaggcttcttaatatggttccccacttctttttttaaaattgtttttttttaagaagtgagatcaagaaaaggaaaatcttacatttgcaaagttgacttttatgcacaaatatagtgaaaatagggaaaatgttagaaatagtcgtgcatggtatttgaacatattctcatccatatatgaataattaattataagtatgtaagttgtgttggaagccttactgtttcatttgcatgtctcaccacacatatataggttttccctttaaaacctgcatttgtctgcatctagatgtaagcttagtttgggaaggctgagatttgtgtatcagaaataggcgttgacaggcctaaaactaatgttattagttcattgtttcagtagcatttattgattgttactgtaccacttcctgacttaagtcagagatgaccagcattctgagttaggacataatcactcagggtcctgacccactggtgaatggattgagagaggtagtgtggctgcacttgcatcaggagcaaacctgacatgactctaagctcagctgcttttctccttcttctcagaaaagctcagctgcagccaggtgcaggggctcatagctataatcccagcactttgggaggccaaggtgggagaatcactggagctcaggagttcaagaccaacctgggcaacatagtgagaccctgtctctatttattaaaacatattaataaacaaaacaaaaaaaaaagaaggctgggcacagtggcccacgactgtaatcctaacattttgggtggcccaggtgggtggatcccttgaggtcaggagttcgagaccagcctggccaacaaggtgaaacctcatctctactaaaaatacaaaattagctgggtgtggtggcatatgcctgtaaccgcagctactcaggaggctgaggcaggagaattgcttgaacccagaggcagaggttgcagtgagctgagatcacaccactgcactccagcctgggcaacagagcgagactgtctcaaaaaaaaaaaaaaaaaaaaaaaagctcagctactgttttacttaaagttttcatttctacctggcccctgacagaagcagaactctaaagtcttaattccttgatttgcctcttcaccttgaaaatagtgaggaactgaaatacggtgagatggaaagcagaggaagggacttccatccttgctaaaaacaaattcagctgaaaaagcattgcgctctccagagactaaaaccccaggcatagggaaacctatcattttctgacctcttaatcccttttccccgtctctgttcagagggcccaatagacataaacatgagtgaaattggaatggattacattcatgaactcttctccaaagacccaaccatcaagctcggaggtcactggaagccttctgattgcatgcctcggtggaaggtagggtgtgaagtcacagccaaaatgctgagaagcccacctggggtttgcctttggtccgaatcaccatgggattagctaaccatgacattttgtcattttcatcctaccattccatgcaaatgtagaaacattttagaggaatgggtttccacaaggactctttttgtagatacagaaatttgcattattctgatgaccgagcaagaccctttggtcttcccaccaggaatattaacaaagcaaggggatgagggcgttggtggtctctaatgacccatttgcagaagtcatctacagagtcagtgcttcattcctgttctccattggttactacaagattagtggattaaaaagcaaagttacctggcttgacattgagatttagtttttttctgcctgaccatagtcagaagacatcagtagttttcgttaagctgtgaccccagctgaagtccattctttcaacaagtatctattaaaatgcgtattctgtgccagcctcgttaagtgctgctgatgcagcagatctggaacacatcagtatccagcccatcgctgggaaataaaaacagttgaataaccagcatttgtacattgcacattgtaaggggaaatactgttttgtgaagcttgttttaattgtaagtttatagatgtatttttgtcacagtgtagaatgtgtgttttcctatgagttatggcctagaataaattataggcctactatgtactataagatatggtatatgtaagaatcacattcatctaggtccaagggccaacttgccaacatagatctttgtttagagaaagctgaggacaagatagccagcctcccagaactcccatgggttggtcagcaattcatcaggggtgtcctgctaaggagtgaaagctgagagtcctaactgtgcttcttttgctgtaatccactccaggtggcgatccttatccccttccggaaccgccacgagcacctcccagtcctgttcagacacctgcttcccatgctccagcgccagcgcctgcagtttgcattttatgtggttgaacaagtgagtagtcctttcttttcctttcttttttctcttctgagacagcagtttaggttgctgcaagctaatccactgttggtgtgaagagccaataaaactgaaatcttaggatcgagttgcctgaggtttgaagggggagcagagagcaattctgtgctcctggtttgagatgtctgttgcccagtactgggcacacttgaatccaggagagagctttgttggctcatgaacaaaggcctcttgtattatggttttgttggtgcctgcaggctccagacccaggaagttccccttaagataaagagctgcagcaaggtacagcacagaggatgtggccttggagtcaagagacctcagtgcttgtcatgtctgctgttaatcaaccaagtggcctgggacatttgcaaacttctctaagcctgagggtttggttttgttttaatcttaaaaatattggtagggaaccagatatagaggtcacaaactgaagaagaccgcatggcaaattcagtctgtaaatctttttttttttggtcctgcatatattttatttgcctttagatggaacatgactgtcctactgtggttttctcttgccgggcctactttatatgtttacattactgacttggcttctgtaggcattttgaagtatgtgatccttgaactagaggtgctatatccatagataaacaaaaggttgacagatttccctgaatacactgatcgtcagtctgagggtcttttgcatgctcacctctctctatgggcacacttttgagtctcacagtctgagttgctgttaagtggtcaccctggagcttgccttatactggagtgagaaaaaagctgagcaccactgttcagcaaggctgggcatctgggaaatgctaacggtctatctgccggtcctaagttgggtattttgatagtggcaagggggagtcaatgtagctgtaacactaattaggctgttaactgatttgaactggtttcttcatgagccactgaattctttgtccataggcttgagtccctggcatgctcagtgactgttgtcttagttagatcttaaaaataaaacaagacaaaactaaaaaccactctttgtactagatttggtttatgaacagttagagattggttgatgtgctgaagagcaagtggtaaggagtagaaatggtagtgttgtctcttccctttgtggagcggggtactcttctaaatgctggtacacggttgcatttctgccttcagtagccttgggagagagaagcttgcgtttgctatcacttacatttttaaagaaattggggccagaggtccagtgactttttctttttcttttttttggagatggagtcttgctctgtcgcccaaactggagtacaatggtgcgatcttggctcactgcagcctccgcctcccgggttcaagctattctcctacctcagcctcccaagtagctgggattacaggcatgcgccactacgcctagctaatgtttttgtattttcagtagggatggggtttcaccatgttggccaggctggtctcgaactcctgatccgcccaccttggttttccaaagtgctgggattacaggcgtgagccactgtgcccatgccagaggtccagtgacttctgagccacactgtgagttgatttgtggtgttggacctggttacactagcccagtgatcttttccagttggttctaataaactcgtctttaggcacaggaaagacagcaaagattttccttcaagattcttttaaagataaagttctgtttcttttaggttggtacccaaccctttaatcgagccatgcttttcaacgttggctttcaagaagcaatgaaagacttggattgggactgtttgatttttcatgatgtagatcacataccggaaagtgatcgcaactattatggatgtggacagatgccgaggcattttgcaaccaaattggataagtatatgtatctgtgagtatcatttcttcttaattaaagaggttaaatctgaaaggatggtgagcgatgtgaaaaggaaatctaattagctgcaacctagatgcccatcaactgatggatggataaacaaaatgtgtgtatccatacaattggagcactgtttggcaggagaaagcaatgaaatactgatacgtgccaaaacacggatgaacttcgaaaacgttacgttaaagaagccagacacaaaggttgtgtatcatatgattccaggtgtctgaaatgtccagaataagcaaatctatagtgacagaaagtagataaatggttataaggggctaaggaggataggaggagcagggggtgattgctaatgggtgcaaggctttgcgggggacagtgatgaaacatgttaatatagattgtggtcatggttgcacaattcagtgaataaactaaaaccattgaatgatatactctaaatgggccaattgtgtatgggtatgtcaattatatctcactaaagctattaaaaatcagtttgcaaaaattaattttgctaatttgatacattcatatggttcaggtcaggagcacagagagcactgtttttagtcctcaaatgagaaccttctagggaaaacagttaccctgtaacacacagatgattgatgtcccacatctcctcctaggcttccttataccgagttctttggcggagtgagtggcttaacagtggaacaatttcggaaaatcaatggctttcctaatgctttctggggttggggtggagaagatgacgacctctggaacaggtacctctgccgttctttcggtgtcttctagaaatgctaccttagactgcagaccaatactatccgataggaatataatgcaagccatgtgtgtaatttaacatgttctagtagctacagtttaaaaggttaaggaaaaaaatgaaattgaccagctgtgatggctcacacctgtaatcccagcactttggaaggccgaggtgggaggatcacttgagcccgggagttcgaggccacagagagctgtgccactgcactctagcttgggtgacagagtgagacctgtcttaaaaaatacacacacacacacacacacaccacacacatccaagtttttagaaaatatctttaatcttaatttaaaaatatcttaatatcttaaaaaacaaactgtatatcccaacaaagcagctattttcatttttctcctttgacatgcgaaaatcaacaaattataatttagcaattttttcttctaataaataatacgttcattataaaatacaaatgagtataaaaataaattacccacaacaataagtaacatgttaccatttcattgagtttattttgtgtttaaaaagtggcaagtgaacagtaatttaaaatctctgtgtgtcagtttttaaaatcacaaatctcaggattgtgaggattaaatgatgtaatgtgtatagagctctggcatatctgatatgtgataagctctcaataggtgttactgtttttattatatcaacattaaatactctgtaaacaggatcttaagtggctccatttaattcggttatatagatgtactgtaatttatgtaactatttcctggtgtatatttagaatcttttccattttccactatttagagtgtgatatagtagataattcttttgcctgttattcctatttaggaaaaattcctataagcgaatgtagtcattttaaggctctttttttttttaagctctgtcctttaatggatgcaaatagggtttttaaggcatattataactaagtgcccctcctgctaaaggttctaacaaaacttttcacttcaccagtgttctctgtactaaatgcccatttcattggaaccactccaaactgaagggtggaatattagtgatatgtctacatagatttagctgcgccatcacataaggcttgtactgtacaagcttgggtgaacaatcctgtgtgtgagtggaataaagtaatatttttatggagtaagtaaacagtaacctcataaggaacaaatgcaaaatactacctggtatctgtttcctttgtagcttggcttttgaaaagtatgtgtttgttgttaattacaaggactattttgctaataaaaattcaaatgataggctgagcactgtggctcacacctgtaatcccacctcttcacaaggcctaggcttgaggatcacttgagcccaggagttcaagaccagcctgggcaacagtgagaccttgtctctacaaaaaataaaaaaaattagcctgttgtggtggcacacgcctgtagtcccagctactcaggaggctgagatgggaggactaattgagcctgggagattgaggctgcactgaaccatgatcacctcactgtactccagcctgggcaacacagtggaccctgtctcttaaaaaaaaaaaaattagatgatacaagtgtctaagtattaatccccattttgattctattttattccctggaagtaaccatttctttccgtacttttcttttcttttttgagacagattttctttctgttacccaagctggtgcaattttgctcactgcaacctttgcctcccgggttcaagtgattctcctgtctcagcctcctgagtagctgggattacagacctgcaccaccacgcctggctaatttttttttttttttttaagtagagatggggtttcaccattttggccaggctggtctcgaactcctgacctcaaatgatctgcccacctcggcctcccaaagtgctgggattacaggcacgagccacctagcccagcctattttttccgttcacataaaaactttaattcagttaaaattgagttttaactcagtttttaagaaatgacacaatgagtcagttaagcgggtgagagcttttgctgtgtgtgatttccagggtaagcttgtaacatgtcttgtaggctttggtcactcctgggctattaccgttgtatctaaaagcctgttctcttggtcttggacagagtacagaatgcaggctattctgtgagccggccagagggtgacacaggaaagtacaagtccattcctcatcaccatcgaggagaagtccagtttcttggaaggttggtggaatttatctctgtctcttagaagtatcccctatactttcatgtccggatatcttagagcatattacagccccttctcctactccccaccccgaggccctgttctgacagctgtttgacagctgttgcatgtattctaactctgaggcagaacagtgtggggatcagaccgttggtgaacattttcaatagtaagattcttcgaaggaaatcacttgtcctatgtcttcagccttgtggtctccacagtagcctttggggaatttgggaagaaacagcttgggtgaaggtccctgaggtgacagagcagtggcgccctttccgcaggctcccgttccgaatggtgtcctgagcttctgtctgggtggctgcagttgctgtgttaccttttctttctttgtgtgtgtgtgtgtgtgtgtgtgtgtgtgtgtgtgtgtcttttctaaattgtggggaagactgtgctctagacaaccaattctaattgctgaaattctgttttcatgggagtaaaatggcactgaatacagagtatgaactttctcatctgttgtatttttaatgctttacctcccacttccccactctctgaccttgggcaagttacctcacattattaagccttggcttcctcatttgctagcaggggctggcgtgagcattaaatgaaataattaagtgaagcacctggcatgaaacacaggaggtgtttctgaccacagcactcagcctggcatagcagaattggccgtgcgcccaccttgtgctgcagaagtgctgccatgggttgcgtcctctgctgtgggacgccctgctccatcctctggctgcagaggcatggatcctcactcagagccacctcttctctgttccctccctaaacaggtatgctctgctgaggaagtcaaaagaacggcaagggctggatggcctcaacaacctgaactactttgcaaacatcacatacgacgccttgtataaaaacataactgtcaacctgacacccgagctggctcaggtgaacgagtactgagaggagagaatgtacgtttgctttacccaccgccaccaagaaagcagtccgatgagatttttttttggaggggggagggtctacacagcaagagaacagaaatactgtgtctcatgaaggatcacagagttcagggggaaaatgtgacagcacacgcacaaacgccttcactggatcagccgctggaactgagggagtgagcttggggacttccttcgtcagcactggctttctgttttcacaagacagacgtctgtcccgctgctctctccccatctcctaccccacatcctgtcttagccgcagtctccagaacccatgatgaactgtgatctgccgtggtcctgccgtggtcctgccgtggagcctgtccctacacatgaccttggagcctcttggccttcagagcagaggcaaacccaccacagggcagctgcgttttaggaagagcaaatgaaactccacaccattcttctagatctctggtgttctctttggtttcattttttttaaaaattaccttctttgggtggggattgagggtggaggggagggtgtttgggaaagataaatagacataaatatataacaatcacttcttgaagaagtataattgtaaataagccatgtaaaatgcctttttaaaatttaattttctagctggctccaattcaaattgaggatttatgtattaggccacttacttggttggcaagtgcaggaactcagttaaaatgcagttgaagaatgtcatctcccgaattgctgtcactttggcgagggagtggatatagggcatgtcacaaaagaacaaaataacccgacctttattgctgggagctggcttctgtccctttcttccccccccccacgagtcttgcccttgacttctgctctggattcactcttccctgtcggccgcgcatgtgctcatcccactctccgctaagcgggaggctgctgttagagcaggctgcttcctgcctaaagcaggcccttcggggctcgctgcacacacatctctggctctccaggcttcgtgttctgtcttttcatcagcatggcggggcggggggcggggggcgggggtgtgtatgggaatccctccccctcttactttttctcttgtggaacttggccacagtttctgaacaatgtgcctacattaccagctggcttcagtgattcctctgtgtccctttttggtttctggaaagattctttgtcaacattagtaactgatacatagaaccaaggagcactcaaatagggagccaggagccagggagctggtgacacttgtgtgctgtggggcagctgggatccaggtaagaccggattgaagctttgaaattagactaacaaagctccagacagcaagagcccaggtgcactgctcacacccccacctgcattttgaagtcatattattttttgttttgttttttaagacggtctggctctgtcgcctaagctggagtgtggtggcacgatcacagctcactgcagcctccatctcctaggctcaagccattttcccacctcagcctcccgagtagctgggactacaggtgcacaccaccacacctggctaattttttgtatttttagtagagacgggggtttcttccatgttgcccaggctggtctcgaactcctggactcaagcaatccgcccaccttgacttcccaaagtgctgggattatgggcgggtgtgagccattgcgcccagccttgaagtcatgttctaaattgtatttgaatttgtgcctctttgtttttccccaaaccaaagccctcaaattgtagtctctgtcggcttctgcagaattctggaaaatgccagttttcctcccccgcccttgttttccataaaacatatttatatattgtgatgaggagtactttctgaagagtacttcgtatttttttttaattgccttgtttgccttcaacttccttgattttcatagtttacatgggtgtgtgtaggggtgtgtgtgtgtatgtgtgtgggttagggcttttttcgttgcatgtgatggttctgtggacatatgatccccacaaactgtgggagtgattggccaggccttgttttttttgtttgtttgtttgtgtttttgttcttttgaagaatagagtggtatttagaaaataaattgcattgcaaagctcttatcggctcatatgagagagcaggttcctgcccttgaaaatgccggtaagctatagcatatgttttttaagacttaagcatttcatgctttaaaataccttcacaagtgaacattacacacagaagttcatttggttttcctttgttttatggtgcatatagcaataaagacccccctccaccctgcaacccccatcccccaccgggcctttgtccctgccttggcttttctccccttctcattctcctctcccctttcctcactgaaggctgtgagttgctttcaatgtgacaacactatgatgtcatttggaaggatttgccaggacagactgattctgagtcctgggtgccgtatgtgtatgcggcagtgttgtcaggcgatcttgtttgaagctctatgttgccataattaccatcaagtacacactgttggcaaaaggctaacacctgactttagaaaatgctgatttgagaacaaaaggaaaggtcttttttcactgcttaaagtggggtcactttgatacctttgcggtcatgtctgtgtctgatgagtgtagaatctctggatgtgcactgtcagtcatgtgtccaccaggcctcgaatatcatatgggaaatgtcatagttaaaaacgtacagccaggcccgtgtgctgttaatagtgtgaaattgtcatgttaaaaaaaaaaacaaaacaggaaccaaatgtgaccttgtgcatatattggtagctgaaaatcttcaaggctactgatgggtggccccttaatcttgtctttgattgctgtgtgcagggaaaggtgtccccgtttgttcatgctgttttggggggtgggggggtatttgcaagaatactcattttgacataataggtcctcttgtcagagatcctctaccacagacattaatagctgagcaggagccacatggattgattgtatccactcaccattgacgatggcattgagcgtagctagcttatttccatcactacgtgtttttgagcttgctcttacgttttaagaggtgccaggggtacatttttgcactgaaatctaaagatgttttaaaaaacacttttcacaaaaatagtcctttgtcattacattatttactcatgtgtttgtacatttttgtatgttaatttatgaatgattttttcagtaaaaaatacatattcaagaaccaaaccttggtggtcatttctctttgtgtaggacagtttgggtccttgggggtctttcctttttcctttcctttcctacaggagttcaacttaaggcagctcagctgagctctgggtcttgctggggtaaatactgcctgacccgtgctgcaggtgaacgggctgagtaaaaagctacgcagtgtaacagaagcagtcctccactgtgctgcccaggcatgcccacgcttgggttttctttcaagaatcacccaggtggtaccaagaaagttgcataagacacttgagtgaggggacttgggggtgaagggggtggtgagggttgatggagtttgattccagaaggttctctgggatcagtgtagggtttatatgccagattctgctcagagattgtcatcatggcttctatgtgttgaatgtttgccactcacagtattaatagtgtcagatgccggggacataataatagagaaaataagacaggatcagtggactcattaaacttacggtccactggggggtatgattaaaattgtatcctcaatacctggtccaaaaggggaagctgcaggtgacgagtgcatggtagggtgggcattccagttgggaatgtagggaaggtggaagcaagtgagctagggggagacaaggagcgtgtggcacacagctgcagggcagggaggaagccagcgtggctggagtagagggggcaggggggcgcacagggggaggagtttgcatttcatccttagagcagtggattcaagagttttcagcaggcagggctgcgtgatgcgattcggattccatagcaactttgagagatggctctggttgcagggagaacgagcgatggtacagaagcagaagagaagcaggggcgagtgagatgggtgcagggacgacggaggaggggagactgggagatactgaggtcgtgctcccaggacctgccaggggtgatggggatggaggactccacctaagctgctggcttcccacttgcacaggtaacagggccattccctgagatgggggcactagagtcagaccagattggcgggatagatacgagatcagttgtgactgctgagttcagggagttttgagacaacctggcagagacagcagggtgggggctacaggcagactggggggtctttgggtggaggaggttagtaaggacccagcagcgggtgagattgctgggggattgagaacaggaagcatagagtaagagaaggcagcagccttggcccagcctctgagaacctggttgagaaaaggaggatgagtgagcaggaggaggggtgggaggacaagcaggccaagagggagagtggtcagccgtgctgaaggcagcagagaagcgatacaagaggaagagggagaagcagtgagttggcagtggccaggtgttggaaatgtggcaggagccgttttgctgacctgatggggtggaaggaggagatagcagcagagtgggtgtctcttggatttcctgggaaggggtggaaagaggaggtcagggccacaggaagcgcgggaagctgggggtgggaggtgaggtggggttgggttttggttttcccacaagagaagcttgagtgtgtttcttctgaaccacagggaatgtctgagagagcacagctgaatacgtacaagagaccaggtgatctggtgggaatgtccctgaactactggcaggagatgagattcaaaccagaaaaaccaaacagaaggaacgaggagctctgtataggccatcccattggcagacacacaccccgtgaagactgttgttgctgtggaggtcagagatcccttccagccagctgctggaattgggattcagcagaactgattcctggcactaccacgtcctccatactctcaacattttttttttttagttttcagggaagtccagtaataaaaatagttcctatttattgagtacttgctatgtgccagggcctatgctaagtgcattgcacaccgtgagtcctcaaccct

SEQ ID NO: 486 - DNA, 3163 bp, Homo Sapiens
gggaggcggtggccgaggcccaggcggtggcggcggcggcccaggaggcggcggacggggagctgcgggagcaggcccggcctggctctctagcggccgcctggctgcagcatgcgcgcccgccgggggctgctgcggctgccgcgccgctcgctgctcgccgcgctcttcttcttttctctctcgtcctcgctgctgtacttcgtctatgtggcgcccggcatagtgaacacctacctcttcatgatgcaagcccaaggcattctgatccgggacaacgtgagaacaatcggtgctcaggtttatgagcaggtgcttcggagtgcttatgccaagaggaacagcagtgtaaatgactcagattatcctcttgacttgaaccacagtgaaaccttcctgcaaactacaacatttcttcctgaagacttcacctactttgcaaaccatacctgccctgaaagactcccttccatgaagggcccaatagacataaacatgagtgaaattggaatggattacattcatgaactcttctccaaagacccaaccatcaagctcggaggtcactggaagccttctgattgcatgcctcggtggaaggtggcgatccttatccccttccggaaccgccacgagcacctcccagtcctgttcagacacctgcttcccatgctccagcgccagcgcctgcagtttgcattttatgtggttgaacaagttggtacccaaccctttaatcgagccatgcttttcaacgttggctttcaagaagcaatgaaagacttggattgggactgtttgatttttcatgatgtagatcacataccggaaagtgatcgcaactattatggatgtggacagatgccgaggcattttgcaaccaaattggataagtatatgtatctgcttccttataccgagttctttggcggagtgagtggcttaacagtggaacaatttcggaaaatcaatggctttcctaatgctttctggggttggggtggagaagatgacgacctctggaacagagtacagaatgcaggctattctgtgagccggccagagggtgacacaggaaagtacaagtccattcctcatcaccatcgaggagaagtccagtttcttggaaggtatgctctgctgaggaagtcaaaagaacggcaagggctggatggcctcaacaacctgaactactttgcaaacatcacatacgacgccttgtataaaaacataactgtcaacctgacacccgagctggctcaggtgaacgagtactgagaggagagaatgtacgtttgctttacccaccgccaccaagaaagcagtccgatgagatttttttttggaggggggagggtctacacagcaagagaacagaaatactgtgtctcatgaaggatcacagagttcagggggaaaatgtgacagcacacgcacaaacgccttcactggatcagccgctggaactgagggagtgagcttggggacttccttcgtcagcactggctttctgttttcacaagacagacgtctgtcccgctgctctctccccatctcctaccccacatcctgtcttagccgcagtctccagaacccatgatgaactgtgatctgccgtggtcctgccgtggtcctgccgtggagcctgtccctacacatgaccttggagcctcttggccttcagagcagaggcaaacccaccacagggcagctgcgttttaggaagagcaaatgaaactccacaccattcttctagatctctggtgttctctttggtttcattttttttaaaaattaccttctttgggtggggattgagggtggaggggagggtgtttgggaaagataaatagacataaatatataacaatcacttcttgaagaagtataattgtaaataagccatgtaaaatgcctttttaaaatttaattttctagctggctccaattcaaattgaggatttatgtattaggccacttacttggttggcaagtgcaggaactcagttaaaatgcagttgaagaatgtcatctcccgaattgctgtcactttggcgagggagtggatatagggcatgtcacaaaagaacaaaataacccgacctttattgctgggagctggcttctgtccctttcttccccccccccacgagtcttgcccttgacttctgctctggattcactcttccctgtcggccgcgcatgtgctcatcccactctccgctaagcgggaggctgctgttagagcaggctgcttcctgcctaaagcaggcccttcggggctcgctgcacacacatctctggctctccaggcttcgtgttctgtcttttcatcagcatggcggggcggggggcggggggcgggggtgtgtatgggaatccctccccctcttactttttctcttgtggaacttggccacagtttctgaacaatgtgcctacattaccagctggcttcagtgattcctctgtgtccctttttggtttctggaaagattctttgtcaacattagtaactgatacatagaaccaaggagcactcaaatagggagccaggagccagggagctggtgacacttgtgtgctgtggggcagctgggatccagggagaacgagcgatggtacagaagcagaagagaagcaggggcgagtgagatgggtgcagggacgacggaggaggggagactgggagatactgaggtcgtgctcccaggacctgccaggggtgatggggatggaggactccacctaagctgctggcttcccacttgcacagggaatgtctgagagagcacagctgaatacgtacaagagaccaggtgatctggtgggaatgtccctgaactactggcaggagatgagattcaaaccagaaaaaccaaacagaaggaacgaggagctctgtataggccatcccattggcagacacacaccccgtgaagactgttgttgctgtggaggtcagagatcccttccagccagctgctggaattgggattcagcagaactgattcctggcactaccacgtcctccatactctcaacattttttttttttagttttcagggaagtccagtaataaaaatagttcctatttattgagtacttgctatgtgccagggcctatgctaagtgcattgcacaccgtgagtcctcaaccct

SEQ ID NO: 487 - protein, 388 aa, Homo Sapiens
MRARRGLLRLPRRSLLAALFFFSLSSSLLYFVYVAPGIVNTYLFMMQAQGILIRDNVRTIGAQVYEQVLRSAYAKRNSSVNDSDYPLDLNHSETFLQTTTFLPEDFTYFANHTCPERLPSMKGPIDINMSEIGMDYIHELFSKDPTIKLGGHWKPSDCMPRWKVAILIPFRNRHEHLPVLFRHLLPMLQRQRLQFAFYVVEQVGTQPFNRAMLFNVGFQEAMKDLDWDCLIFHDVDHIPESDRNYYGCGQMPRHFATKLDKYMYLLPYTEFFGGVSGLTVEQFRKINGFPNAFWGWGGEDDDLWNRVQNAGYSVSRPEGDTGKYKSIPHHHRGEVQFLGRYALLRKSKERQGLDGLNNLNYFANITYDALYKNITVNLTPELAQVNEY

SEQ ID NO: 488 - DNA, 4698 bp, Homo Sapiens
gggagcggcgaggcggcggcggcggcgagtggcggcccgcgaggcccgggaggcggtggccgaggcccaggcggtggcggcggcggcccaggaggcggcggacggggagctgcgggagcaggcccggcctggctctctagcggccgcctggctgcagcatgcgcgcccgccgggggctgctgcggctgccgcgccgctcgctgctcgccgcgctcttcttcttttctctctcgtcctcgctgctgtacttcgtctatgtggcgcccggcatagtgaacacctacctcttcatgatgcaagcccaaggcattctgatccgggacaacgtgagaacaatcggtgctcaggtttatgagcaggtgcttcggagtgcttatgccaagaggaacagcagtgtaaatgactcagattatcctcttgacttgaaccacagtgaaaccttcctgcaaactacaacatttcttcctgaagacttcacctactttgcaaaccatacctgccctgaaagactcccttccatgaagggcccaatagacataaacatgagtgaaattggaatggattacattcatgaactcttctccaaagacccaaccatcaagctcggaggtcactggaagccttctgattgcatgcctcggtggaaggtggcgatccttatccccttccggaaccgccacgagcacctcccagtcctgttcagacacctgcttcccatgctccagcgccagcgcctgcagtttgcattttatgtggttgaacaagttggtacccaaccctttaatcgagccatgcttttcaacgttggctttcaagaagcaatgaaagacttggattgggactgtttgatttttcatgatgtagatcacataccggaaagtgatcgcaactattatggatgtggacagatgccgaggcattttgcaaccaaattggataagtatatgtatctgcttccttataccgagttctttggcggagtgagtggcttaacagtggaacaatttcggaaaatcaatggctttcctaatgctttctggggttggggtggagaagatgacgacctctggaacagagtacagaatgcaggctattctgtgagccggccagagggtgacacaggaaagtacaagtccattcctcatcaccatcgaggagaagtccagtttcttggaaggtatgctctgctgaggaagtcaaaagaacggcaagggctggatggcctcaacaacctgaactactttgcaaacatcacatacgacgccttgtataaaaacataactgtcaacctgacacccgagctggctcaggtgaacgagtactgagaggagagaatgtacgtttgctttacccaccgccaccaagaaagcagtccgatgagatttttttttggaggggggagggtctacacagcaagagaacagaaatactgtgtctcatgaaggatcacagagttcagggggaaaatgtgacagcacacgcacaaacgccttcactggatcagccgctggaactgagggagtgagcttggggacttccttcgtcagcactggctttctgttttcacaagacagacgtctgtcccgctgctctctccccatctcctaccccacatcctgtcttagccgcagtctccagaacccatgatgaactgtgatctgccgtggtcctgccgtggtcctgccgtggagcctgtccctacacatgaccttggagcctcttggccttcagagcagaggcaaacccaccacagggcagctgcgttttaggaagagcaaatgaaactccacaccattcttctagatctctggtgttctctttggtttcattttttttaaaaattaccttctttgggtggggattgagggtggaggggagggtgtttgggaaagataaatagacataaatatataacaatcacttcttgaagaagtataattgtaaataagccatgtaaaatgcctttttaaaatttaattttctagctggctccaattcaaattgaggatttatgtattaggccacttacttggttggcaagtgcaggaactcagttaaaatgcagttgaagaatgtcatctcccgaattgctgtcactttggcgagggagtggatatagggcatgtcacaaaagaacaaaataacccgacctttattgctgggagctggcttctgtccctttcttccccccccccacgagtcttgcccttgacttctgctctggattcactcttccctgtcggccgcgcatgtgctcatcccactctccgctaagcgggaggctgctgttagagcaggctgcttcctgcctaaagcaggcccttcggggctcgctgcacacacatctctggctctccaggcttcgtgttctgtcttttcatcagcatggcggggcggggggcggggggcgggggtgtgtatgggaatccctccccctcttactttttctcttgtggaacttggccacagtttctgaacaatgtgcctacattaccagctggcttcagtgattcctctgtgtccctttttggtttctggaaagattctttgtcaacattagtaactgatacatagaaccaaggagcactcaaatagggagccaggagccagggagctggtgacacttgtgtgctgtggggcagctgggatccaggtaagaccggattgaagctttgaaattagactaacaaagctccagacagcaagagcccaggtgcactgctcacacccccacctgcattttgaagtcatattattttttgttttgttttttaagacggtctggctctgtcgcctaagctggagtgtggtggcacgatcacagctcactgcagcctccatctcctaggctcaagccattttcccacctcagcctcccgagtagctgggactacaggtgcacaccaccacacctggctaattttttgtatttttagtagagacgggggtttcttccatgttgcccaggctggtctcgaactcctggactcaagcaatccgcccaccttgacttcccaaagtgctgggattatgggcgggtgtgagccattgcgcccagccttgaagtcatgttctaaattgtatttgaatttgtgcctctttgtttttccccaaaccaaagccctcaaattgtagtctctgtcggcttctgcagaattctggaaaatgccagttttcctcccccgcccttgttttccataaaacatatttatatattgtgatgaggagtactttctgaagagtacttcgtatttttttttaattgccttgtttgccttcaacttccttgattttcatagtttacatgggtgtgtgtaggggtgtgtgtgtgtatgtgtgtgggttagggcttttttcgttgcatgtgatggttctgtggacatatgatccccacaaactgtgggagtgattggccaggccttgttttttttgtttgtttgtttgtgtttttgttcttttgaagaatagagtggtatttagaaaataaattgcattgcaaagctcttatcggctcatatgagagagcaggttcctgcccttgaaaatgccggtaagctatagcatatgttttttaagacttaagcatttcatgctttaaaataccttcacaagtgaacattacacacagaagttcatttggttttcctttgttttatggtgcatatagcaataaagacccccctccaccctgcaacccccatcccccaccgggcctttgtccctgccttggcttttctccccttctcattctcctctcccctttcctcactgaaggctgtgagttgctttcaatgtgacaacactatgatgtcatttggaaggatttgccaggacagactgattctgagtcctgggtgccgtatgtgtatgcggcagtgttgtcaggcgatcttgtttgaagctctatgttgccataattaccatcaagtacacactgttggcaaaaggctaacacctgactttagaaaatgctgatttgagaacaaaaggaaaggtcttttttcactgcttaaagtggggtcactttgatacctttgcggtcatgtctgtgtctgatgagtgtagaatctctggatgtgcactgtcagtcatgtgtccaccaggcctcgaatatcatatgggaaatgtcatagttaaaaacgtacagccaggcccgtgtgctgttaatagtgtgaaattgtcatgttaaaaaaaaaaacaaaacaggaaccaaatgtgaccttgtgcatatattggtagctgaaaatcttcaaggctactgatgggtggccccttaatcttgtctttgattgctgtgtgcagggaaaggtgtccccgtttgttcatgctgttttggggggtgggggggtatttgcaagaatactcattttgacataataggtcctcttgtcagagatcctctaccacagacattaatagctgagcaggagccacatggattgattgtatccactcaccattgacgatggcattgagcgtagctagcttatttccatcactacgtgtttttgagcttgctcttacgttttaagaggtgccaggggtacatttttgcactgaaatctaaagatgttttaaaaaacacttttcacaaaaatagtcctttgtcattacattatttactcatgtgtttgtacatttttgtatgttaatttatgaatgattttttcagtaaaaaatacatattcaagaaccaaa

SEQ ID NO: 489 - protein, 388 aa, Homo Sapiens; identical to SEQ ID NO: 487

SEQ ID NO: 490 - DNA, 53371 bp, Mus Musculus
ttatgcatggagtcataaagtaggtcacacacgttgcatgctctgctctgcgtctggcctttctcataggccgtgctttcaaggttcagccaggtggttcgctgcaaggtttgtgtttgtttgtttgtttttgttcttgaaggctgaataatattccctggtatggatatatactacctacccattagggggacttgggttgttttctccttgactcttggggaaaaccctgctgggaacattcctgtgcatgtttgtgtggactggaagccacccaggggacatttaactgtcttggagccatcctgggtctgtattgacctatgactttatttattatttgttggactaaagatttaaagcggggtcctcaagataacactagaggagtgtcatgttactgagtgacagtccaggctgccccctttttcacttttttgttttttggtattttgagacagtgtttctcagtgtagccctggatgtcttgggccttgctctgtagaccaggctggccttgaactcagagatttgcctgcttctgggattaaaggcttaaaggcatgcaccaccactgcctggacctttttcatgtttcatttttaaactaatttttaaaaagcgaaacaggagagatcccgtgtagctcaggttagtctcagacttgtgtagatgaggcagagatcttgaattcttgatccctccacctttgcctctcaaatgtgggcattattaaaggtgtgggttaccatgccccatactagcaaatttctttttatatttcatttgtcttgtgtgtacaacgtgtgcacatgtgtgtgtacatgtgtacatgtgtgtgctcgtgtgtagaggtcagaggacagcttgtaggaacagttctcttctcccactatgtgaatcctggtggatctaacccaggctgtcaggctgagtggcaggcgccatcctgttaagccatcttcccagccactttttattttttgaaacaaagtgacaatagtatcctccttgggttagttggagagggtagagcacgcctttcatcccaggactcaggaggcagagacaggtagatctctgtgagttggaggccagcatgatctacatagcaagctccagggtggccagatccacctgcctctgcctcttgagtcctggatgagaggcgtgcataaccaccgcccacttctttttatgattttaaagccgttctcatggagcccagcctagcctggaacttgccattctcctgcctcagcctgagtgtgtgtaacaccatacctggctagttttcatgttagcatttgtttattatttgtgatgtaaggatggaacccagggctcctgcaggctacacaaactctacctcagagccccatctcaacctgtttgctccattgcgggaatgagtttgtgcctgtgacgcccttctctcaagaagtaagggattcaggactgatttactgtcctgtggtgtgaactctggtcagtgggtctctctttctcttggaaaaacaaagttgaaaaagcgtgcccatcactatccaggcaggatctgatttgggctctccacaacggtctggtggtttgaggggtcggggtggagggcccactcgatgcctgagaaggtgggagagagccagcacctgggtcccatctggggctctgctcagaactgggcactgcttggtagaggctgtaaggagccagatgtgagccacatggactcccagctggtctgatacaaagggtgtcactgagctaggtgccacaagccagcctggttctggaacctatagtggttgtcatgacatcatggggagccttgcagcacccaagcacccctagaaacacaggaaagacaccaagcaagctgaggggcctgaagggagacatcttgaagaccttgagcataaaggcccagggtggccagaaacagcgggagggcgctgggggtgtggctctgttagcagagcagtataaaccctggtttccaccgccagcatttcagaaagcaggcacggctgtgtgcgtctggaatcctagtgctacacaaaggcaaagacaggaatatcaggagtttaaggcttgctaatcctatatagagttcaaggccggcgtgagctaccgtctcaaatataaaataaaaacaaggctgtggagaaggttcagaatataaagtgcctgccaccaagccttggtgacctgagtttgattccagtgacccatatggtggaaggagggaaccactctcctgtaagttgtcctttgacctccataggatgccatgacacttgtacccacatacctaccgataataaagtttgaaacgaataaaaacaaacaaacaaacagccaggtgtggtagcacatgccttcttcattcccagcactcaacaggcagaggcaggtggatcggtgtgagttagttacaacacgtgcctggtctgtgtagagacttccagccagccaaggctctgtcacaacaaaccaacaaaaacaaagaaactaaaaaagaaatgtcaggcggggcggggcttgtgggcccagagggtcctggtccagatgagtttattctaagctgcaggaagtcaccaggggattttacttgaaggggtgacacagtgccttgggcgtcacatgggaaccaggaggaggccactgagccacagaaaggaagtggaagctgacagaggcacctgtgggctgagtacactagccaatcagctgtgggacgagcgggccccaggtgtctctgtggctggctaggggacagggccatggcagggtggcatggaggcacctggactgataatacagacttagggcacccaggaggagaagaggagcatcacctactaccccactccttcccctttctctcaccctttttcttagttttcaattttgttttgttttttgaggcagggtttctctgtgtagccctggctgtcctggaactcactctgtagaccaggctggcctcaaactcagaaatccacctgcctctgcctcccaagtgctggaattaaaggcatgcgccaccactgcccagctagttttcaactttttagtatgtagttttattttagtttactgctgtgcatgtttgagtgggggcgctcatgtgtgtcatgtgtgcatagactcaggaaaactttgaggcttgttttttttcatccaccgtaggatctgggatccaaactcaggtgatcagtttaaccccactgagctatcatccctccactccctgtttctgttttctttcgaaaccaagcaggctttgagttctgtatgtggtttaagactacacctgaattcctgatcctcctgcctaagtcctaagcactaggattacaggtgagttccactgctgggtttcattatcaccctctctccccctctctctttctctctctcttccagacaaggtttttctgtgtagcctggctgtcctggaactcattatgtagaccaagttatctttaaattcagagatcctcctgcctcagcctccaggttgctgggactaaagttgtgtaccactgccacctggcataattctctcttaaaaaatacagtatttatttttatgtatatgtgtgtgagtttgcaaaggatcctacaaagaccagaagaaagcgtcagaccccctgaactaggagttccacgcagttgtgagctgccatgtgggtgctgggaactgaacctgggtcctctggaagaacagccccttcacttaactcctgagtcatctctctcagaccctatgactttcttttgagatccatcatcaaaagtcctaaaaggagtcaggtgtgctggctcagatttataatcccagtatttaggaggtagtaggatccatccttagttcaaggccagtcttcactataaagcaagacccaaaataacagccaggcctgtggctgtggctgggtggtggaacgcttgtgtaacatactacagacctggggacccacgaaaacctgcagaaaagtcccaacttaatcagtctttgttacctgagacagctgctcctgtagcccaggctgtccttgaatttgagatcctgctcgtctacccattgagcgtggttctggcactgggcatacaccctatcaaaggagctacagaaccagcctctgttcctgggtcagtcttggcacaggctggtattttcatttttttaaaagatttatttattttatgtatatgagtacactgtagccgtcttcagacacagaagagggcgtcggatcctattgcagatggttgtgagccaccatgtcggtgctgagaattgaactcaggacctctggaagagcagtcagtgctcttaactgctgagccatctgtccagcccattgtattttcatttttgtgggggaaatatgtggaacgattgctaggttggatacacctgcacttgccctaacgatgtatttatttacgggttttgtttgatttgaggcagggtctgtgtagccctggttgtcctagaacttaccctttagtccaggctggccttgaactcacagataaagccacctgccctgcctcctaattcctgagactaaagttgtgtgccaccacacccaacttcaatttttttcttttgaaaaatactattattttaactttaaaaaaaaaaatgtgtttgggtgtcttgtctgaacgtatgtctctgcaccatgtgtgtgtaccgtgcccacagagaccagcaaagtcctcgaggactgcagttacaggtgcctttgagccaccatgtgtgttctgtgactccaaacaggccctctggaagagcagccagtgctcctaaccactgaaccaccgctctacctcctatctcatgctcttaacttgcatttcctagtgtctgatagagttcgccgtcttcggatggcttaattacaatacaatccacctctcctagttactgaaaacagataatattcaaatcttatgctcactttaagttgaccttactgaattttgaggactttgttcgtttggtttgaggcaggatagcagaggtatcctggactacagagcaacaccctttctcgtgcctggaggaccagaagttcaaggtcatcattgactgcaccgtggtttggatgcctttttgaggtacgtgagaccctggcttgaaaagaaaaagagcgggagagagagacagggaatcagagaggatggttcaggccccggcctagctccttgtttggcgagggtccttggcatcttcttcccttttttgggcagctggatctgcagatgcctggattaggcactttttatttcccaggatgctcttccttctggtgccatcgacttccaacctccccacagtctcccctgagcattctggagcttttccgtgccccaccccccccagccctgtggcccctcccagcacctcacaccctacctcctcccacagccctggctaccatctgccactgtgcttaggtgttgatttgccagtgtctggctctcccgtggaaggtgtcaccgcaggaggctgggtggtttgtgctctcttctgtgatatcccagtctttgatggtacctgatggtgcagcacccagtagctgaactaagatcaaaagggattgccgaattccctcttgggtgatcttggacctctgctttcttttactttcattcattcattcattcattcattcattcatctatcatgtatgtgtgcatgtgcacaggtacgtgtaggtcaggacaccaatgtggaggtcagaggataattttcaggaatcggttttctccttcctgcatgtgggtcccaggtcatcagatttgggaataggcacccttacctgagccatctcaatctctctctctctctggtcctgagtctttctctccctccctccctccctccctccctccctccctccctccctccctccctccctccctccctccttcctgtcactcccttcctgttctttttgtctgtttttgaaacaatgtctccagtagcccaggctggcctcaaagttgcaatgtccagggcgggtccagtcccccttgatcctctggtctccacatccctagagctgtggatggccatcactacctacttgggggccacttctttcaaccacaggcttgtctaggccaggggaggggaggggaggcagcggtggggtcccagagcgcggccccctccagccccggccgcccgcggcgcagcgagacgaatgcagcacacggccgcctttatgggccgcagacagcgcgccgccagcctaaccctgcgtggaaaattcgcaggcgggaggcaggggtgtcgcccggcaggtggaggcgggagaggagagggctgcagtccacagggtggccagcccagccgcggcaggctctcagagtatcacagcagccgatccagagttctttctttcctttttggtttttggagacagccggggctggcctctaagtggctgtgtagcggaggataatcttgaatttctgattttcctacctctaccccccacttatgtgtacagttggatttcagggtgacacaggcagccttaggaagctgagccaaacttgaaatcacggtagtggatgaaagaggtcactgcctgcccagtgtaggactgaggtctggacaaagttcagtgccttggtacccggggcttctctgagctcccgtgttgtgctgggccaggccatgctaagaaaggataagggctcaccagctccggacactggggcccttttacagagtgtgcgcagtggtgcatggaccattcccctcgcttcttcatctgtttgcgctgctgggatggaatgcctgaggcagcgttctgtataaatcaaagacacttgctcagttcagaatgctggtggcctccacatgaggtccttgcgctgggtcaccactgtggaagaacaaagaggaggtgaagccccaccccaccgaaagtgacaggaatccattcatgggacagagtcctcatcacccaaacccccttaggctcccctacccgacacttgtattgaacaaggaaccacatttagaccttagctcctagagacacaaacccaagttggcccgtgtgccttcctgtactgttaacagctttggtgggagaatcaggagaatagaggcgaaaaggaaggcaggtgaccccaggagtaacagcaagacctcccccacccccggcaaagccttgtctcagaatcacacaggaagaaggcagggaagggaatgaggtagtagggtctccgtgctcagagaggtcagtcagaaccacacagaatgtttgttctgggtcagcctgggctaccctgtccaacaaataaaattaagtttagaaaattccagcaaggtggagcgcagtggtaaaggcagtgggcagtcagtctttggatgggtcattctttgtgcctgggacctgatccttagccctgctggctccacagcctctctctggatttctccaaccccttcctccgctgacttgagggaccggctcaatacacgtgtgcatttccccacggccctagcctttcccttttgccacattctctattacattacacacttaagattttaattaattgaaaaatcaattagttaatgatgggggatggtgcgggtgctgtggcctttgtgtgaggtcagaacttttacacagccagtctctccttccaccacatgggctctggggacttgaactcagagcactgggctcagtggcaagtgttcttccctgctgagccatcttgtctgccctgttttctagatattggtttatttatttatgtttaattttattttattttaatttttcattatgtatatttatgcgttggtacgtgcatgtgtgtgcagatagtttgaactcccctggagctggggttacagtggttgtgagcctcctgatgtggctgctgggattgcacttgtgtcctgtggagagcaacaggcattcttaactgctgagcaatttcttcagctcatttgattctgggtgtgtgtgggtgtgtgatgtgtgtacaagtgtgatgtgtgtacaggtacacaggctcatgtgtaagaggaaaacatcaggctttggtccttgtcttccccctcatctgagacagcgtgtcctcattgttcaatgccttcgaatgccgttaacttctggggaaccttctctctttttcgcatctgcagtcagagtagtgtcggttatacatgtgatcaaatagcattttgtgggatctgggatttgaactcaggtcttggaatggcacagttagccatttctgcattaaaccacttctccagccctattctacttatttttattgtatatgtatgatgttggggaggtatgtgatgttttctaccttcgtagggacaatggggactgaatggtcatcagtaagcggtgcaccctctaagctatcttgacaccctagtgttttgaggacagagtctcaagtagtccaggctagctttgaactgctatctccatcttccagctgctggtgtatcacaggtgtgtggcaccaaacagactctttgttttgagacaaggtctcactaagtaacataggctgaacttgaactcgctggtcctatttgctgttctgactctgtctcaaagtggctggggctataggcgtgccccatctcacctattttcatcactagcttcctactcctctccctgcctggggggtcaagaaagtgggactctgtgctaacgcacaacctctgcacccaccctagcacacagtaggtgttcataaatgcaaaaaaagagattgatgaacggacaaaaccagggtggatgctaaagctttttcttttctttctggcgacttggttaacaagggacaggtttcctgagctacagccgggcagagggccaggtgaagggaggggcagggatggggggcgaggctctgccagccagggaaggctcatttccagctgcaggaccagcaagcaccctggcaggatggaggcctaggggccagagctgccctgcccgccggcctgcctgcctgccgccagtgagaattctcacacattgtaaaggaggctccagctctcttctggcggggcagctggttggttgcactgtctgggctaacccagagattcccagctccctgcttagatggtgtgcagggcagagcctcctgaccctggaattctcttcctggggcactgagctgagatcttggccaagtttgccccttggttcactgagacagcacacactgtcccctgagcagctgctccagccccatggtgacttgacactggggggacactccgtagcgtagacatgcagagatacagaagaggggtctggagtgactcgccacagtctgcctccagttgaagattctctccgtatctgctaagaaggggagggaattcagggctgcattctctgtacctttcatctggacgtgggggctaatgcctacaatcctggcactagggaggctaagacaggaggattgccgtgaggttaagaccaatgtggtctacatagttctgggccagcctggattaccatttgaaattctgtctgagagagagagagagagagagagagggagagagagagagagagagagagagagagagagagagagagagagagagagagaggaaagaaggaaggaaggaaggaaggaaggaaggaagaaaagaaaaagatttggagctagggtcctgtcttgtgtgtgtattgggggtggggcaggcagtggggaggtcctgtggatggttagaaagtgcttggcacagacaccgctgggcctgagttcgagcctggctctgcacacactctctggggccagcacagcgtccttcctgtctctcctgaaggaggagaagccccagaggctgggaaggactggggaggcccaagggggtgtgacatgtgtcatgcaggtgtggggctctgggttctcctagcaattcaggtttggggtgagacagaagatctggagatacagaagtaaaagtggtgggagacgggacctcataggcttgagacttagggttcctctgagttgggcctgtgtgtgaatcactatttttttaactgaattgggctggctgaacgtgtgtatgttggtgtagagagaggtgtgttgcaggtgtgagcggtggggggggggcacatttgtgtgtcagtaggtgtggttatgtccgtgggcatgtctgtaggcgcagagatgtattctgggactgaacccagtgagtgtgtgtgcatgtatgcgtgtgtgagttggtgtgtctgggcgggggtgtgggggggggtggcggtctgttgggttggaggtagcctctggtagtgtgcagtgagagtgggagactattcaggcgctgaaagggcatgtgaaggtaaactgatgtgttcacatatagcaaggtaggggatgtccagtgtatgtctgcgtgcgtgtgtgtgtgtggccctgtcaccgccggctccaaacccggcacataaacttcacacccctgcaggcgggctgcgcacggcgcttggcgggtgctgggcaatgagaagcagatgggccaggatgtagaggccatatggggctgggggtgggggtgggggtcactcctccctccagaaccaggaaaccccctgcctgcgccccgtcgcggtggggcctggagctgacactgtagcaaatgtcctgcagccagtgtggagccaacgggagacagcttcagtctcacagggaactctggtgtgtgtgtgtgtgtgtgtgagagagagagagagagagagagagagagagagagagagagagagagagagagtgtttgctcgggcatgctggggcatgcgtgatgagggttggggtgttcaggctgcgtgagatgattttgtcctgggaagctatagctggcctcaagattgtgtaccacacagactcactctgtccctcggtttccccagtggtctactaaacaaggtggctgtttagaattgaatatagaagactttggtccacacctgggcagatattataagccataaggtcagtggtaataaaggtagttgaccttggttgtctgtagggctctgggccatggacctaggctgtgctctgcggttggcgtgtggctcagtgatatagagccctgttcccaggatgagcaacctggggttctatccatcttcatcctgccattaatctgttggcagtaaggacaacacctccaggcctgggctgggacacctgctacgctacctctttctgtgcctcagtttcccctccggagagcagactgataatcctgaggcctccctgtttccgggcagtggtgaagctggcatctggaggcagatgtgtatatctcactgacagtgttctcggaagcttctggaagccgaggaaggagctcgggagacctgggaggcctggcccaccaggatgttatcacagcgatgaggtcggcacagctaggacagctgtggtggtctggggtctgcaaggttgtggccaagtagcgtggtctggagcctgagtccatctggctctttccctggctccattgatgagttcagacaccgccagggccagcctttggcctctttccctgcacaagtccctgggggtggaggtaggggggtccctaccctctggcagtgttaggggacatggtcagtggggagaaactagaggccaacatgccaacaagctgccccaatccatctctgtccttttttgttgttgttctttgaaagctgaggtcagaagggggctgggtgcaggcccagtgctcagaggccagggtgcaggggtcagagtgcagggacaatatgcagggcccagggtgcaggcccagtgagcagggtgcagggctacggtggctctggtggccttggcctggtcaaccatgtcctctgagtctgacttcttgggcgagatcttctggggaggcttaaacttcagtaaagtgtctggaaaatgcgaggtgctcaataaatgccaagttgccttcctgtccccgtggccccttgtgagtatctgatattgatttctaccacccccatccccccatttctcccttttctgggtctcagtccaaaggttttgggttgcccccatcccccagacttaggagggacttgacaaaccaatcagagaactctatcctctcagccaataacagagcgtgggacttatagctggccctgtgagtaattattattattattattattattattattattattattattattatttacttgggtcaccaaccccatgagggtggaagcctggatgtggggttccccgggcttgaatatagggttcacactgcttaggtgagggggagcaaggggcctggcatgggctctcagagaggcctggcgctgagatgagaacgcccccaagcttacatgcccctgctgtagacctggccctgctgtaacctatccctgttgagtgaggggcgcagaggcaggcagcggcggcggaggggctcacacccaggccgactggcgccagccgcagccctctccagctccaggcgctgcagagcggggtgtaaatccctcctggccgcggcctccgcccccagcctcggctgcactggagctcagctatttcggaggttcccaggggacaacgtttcctgcctctggcggaaaaaatctgcagaaaatgagagccctgtggtctggctccaacgcagcctgagcctgactagggagagttcttttcttagtcttctcctctctccatctctgtcgtcctgtctctttctctccctcttttattttgtattttgtatttttgagacagggtttctttcactctgtagctcgggatggcattgaactcttggtgatcctcctgcttcagcctccgtagctgggattgcaggtatgagccatcacattcaacagccttctctggctttcttcgactgtatttatttatttatttatttatttatttatttatcttcctattttcttcttccttcctttctttccttttttcttttttctcttttctcttttcctctttctttctttctttctttctttctttctttctttctttctttctttctttttttttttgagacagggtttctctgtatagccctggctgtcctggagctcactctgtagaccaggctggcctcgaactcagaaatccgcctgcctctgcctcccaagtgctgggattaaaggcgtgcgccaccacacccggcttctttctttttttcctagcaagagtttttctatgtagccttggctgtcctggatctatggctgtagaccaggctggcctcgaactcaccaagctctacctacctgcctctgcttcccgagtgctgggattaaaggtgtgggccacctcctgccctgctctgccctgcctgccattcagggggttgaacctagatcctcacgctggcacacgctcttctactaaacctcatccttagctcccttccactttttattttgagacaggatctcactcagttgctcaggctgaccttgaatttgagattccgtctcagtctctggagtagctgagattactggcctgccgccgtagaccctgatatttctgtctttcctctttttctttccttctatccccccaacctccactccctggccccctattcttgtagatcttagccattttcctgcagccccaaggtcctgcgctggcttctgacaagacgacctgcttgtgctagatgctctgcatggtgaacaggcctatgtgtggtctaataggacaccaatggagatctctactcaactctgtgggtcaatgccttggccggggatagtggaggaggatacaggggagtctcaggtgccggtgcccctgggagcccttcccaaagacatccagggtgttttattttactctattattttattttgagacagtctagagacacacagctagggctgacctagaactcatcatgtagaccagctaggccttgaactcaaggcaatcctcctgcctcggcctcctcatgctgggcatataccactatacccagttaatgcttagagtctttgttttgttttgtttttcgagactgggtttctctgtatagccctggctgtcctggaactcactttgtagaccaggctggtctcaaactcagaaatctgcctgcctctgcctcccgagtgctgggattaaaggcgtgcaccatcacacctggctcaatgcttagagtcttaaaggacctcatggccccaagccctgtcctgctaaacctcaaaacttttgaccccacagacgtggcctccacatagaatggagacctgcttgctacgtcactggtccagagggtacaggttcacattggatttttttttttctgttttgtttgtgagacagagtctctccctatagccctgactatcctgcaactcactatgtagaccaggctggcctcagtctcatggagacccacttgctaccttccaagtgcgggattgaggttcaaggtctaaggactgtatccaaggttgagggatgtatctttctggcagggttgctacagagaccaaagatggagccaggcatcgtgtggtgtctagaggcacatctaagacctaagacagatctagcctaactattgtactggctatctatctatctaaaatcagcttgaaacaagccagaattttctttaagaaaaacctcaattggtaaaatgcctccatcagattggcctgtgggtccctcccctctctccctttctccttctccctctccctctccctctactctctctctctgcagggtttttggttgctgtcctggaactctatctgtagactggacctgcctctgcctccagagagctagtggtcccattgtgggtgatgcacgcccgccggagcaggtggtcctctgttctataaggaagcaggctgagggtcatggggagcagggagcaagccaatgagcagctttcctgtgtggcctctgcttccggtcctgcctgcagcttcctgccttgtgttcctgctccgattcccctgttgatggagtgtgaccagagagtataagctggaatcagcccttttcttccacgggttgcttttgcttgcggtctttaacccagccatagaaacctaaggaagacagttccatgaagtcgtccatctgctacgtgatggccgaggagatgtgctgagtcctcagggcccatttacctctggctcggcttacctagttttgtgacagggtcttgctgggcagcccaggggcctctaaccaactcttcctctctctgccggattacaggcctgagcgagccacctgtctcaaaacatctcttcaaaattccacctggggccgggagagctggctgggcagtaaggagtacttagtgctcttccagaggacagagatttggttcccagcatccacatggtagctcacacgtcctgttactgcaggtccaggggatctaatgacctcttccatgacatctgtgaacattacacacatgacacacagactttcatatagactcattcatgcacatacacatatctttaaaaatctttttggggggtgggggtgttaagataccatatagccctggctgtcctggaactcactctgtaactgtagatccacctgtctctgcctcccaagtgctgggataaaaggcttgtatcactatgctcagctaacaatcttaaaaacaaaacaaaaaaatttttttatatttgtggttgttgtgtgtaggggtgtgtgtgtgtgtgtgtgtgtgtgtgtgtgtgtgtgtgtaggtcagagtactttgtgtactcagttttctccatccacctttacataggtttcagggatcaaactcagttcaccaggctcacacagcaagccccttacttactgtgccctttcgctggcccctgtggtagattttataaggaattattgaatgaatgagcaaactatgtcaattgcttgcctttgtagggagcctcagtgtggtgccttcctcctgggtacctgctaagcttcagagagagagagagagagagagagagagagagagaggagaagaggaggggaggggaagggagaggagagaagagaagaggagaggagaggagaggagaggagaggagaggagaggagaggagaggagaggagaggagaggagagggtgtcttggcaccactcctcgctttgtgacttaccacttgagattgtcacagtctccaaatgaatgagatgccactctggccaacccagctccagtgtgtgcaatggcctgtgtacacagagggctagtcttccctgtgtgactgtctcttaagcatcacacaagcaatgcagaagggacaggatggatagataataagagtgtgccctgagccgggtgtggtggcgcacgcttttaatcccatcacttgggaggcagaggcaggcggatttctgagttccaggccagcctggtctacagagtgagttccaggatagccaggactacacagagaaaccctgtctcgaaaaaccaaaaaaaaaaaaagtgtgccctgggtcattttaaacactgactaatgctcttctgctattaggggtgagaccaggagcctggcctagcagaccctccatggatgtttgttgaatgactgaatgaaatacagcactggctacatttcacacactcagtcagcccaatgtttctggcataagtcccgtccaccacccgctgtctgccagctcagcctctggatttccacatctgctgctgttgccaggagtgacaggccctgggggaggtagttcccgtcttcagagccagggacaagcagaggctgccaggacacgaacttccttcactgagagcctggctgagttattctctgggcctggctagcaatgtcaatcagtcaaactcctgggcccttgggctcctgggcacatgcaggagtagcctcatctgctcaacacatctcctcaactgcctgcctcggtctttccactggaagctggtctgagtgtgaagggagtcgtgcagaattctgggttggttttgacagcgcgtggaggctgagagccgcctggaagcatggaccggctcagccacagctggagacagcctgcaggccttggctgagtcatttcccgccagcctccttgtccccctagaggctgttgggaggccaaggtggaatgtgctaggaagcagggattgtgagccaggggcagacaatgctggccctgctgcttgtcctgcccgctgccttagcctgcttctcctttcttccttccttccttcacttggcagaggcgatgccggatgcttttgcttgctacgctgttatcattttgctgagagagggtctcactctatagcccaggctggcctcaaacccaaagtgatcctcctgcctcaggctcccgagtcctgtcctgggttcacaggtgtatgctacctatcgggaggaacctgtggtggccttgtaaggcaagagtgatctggaagggtcggaagctcggggacctcaggcttgtgtccttggggccttgggtaaatggccttggtccctctgctctcttcctggctaagtttctgaagctcagcttgtcttggtactacttggcaccgttccacctgagtccccacccttacctgtcggtgaaaatccccatggtctgagctagagacttcccagccaggatttggctggagagctgagtggttagacctcccagggaggaagtcgcaggtgtacaggtgtcctctaggctgcattggcctcctgcccactcatggcctttagtcaactggggaatctgtggtggtgcctggggtgaaagggagcccgagggtcacctcttttttgtgtgtccttaaggaggctttagctctctcaggggctgaggcctgtcctctatacaaagaagcattcattcattcattcactcactcatttgtgcacacatttattaatttgtgtctgactgtacacagatgagcacctactgtgtgcagggtactaggtattggtaaggaggcagcctggcggcctggctctctggaaactgacaatctcatgggacaggagggcagaaaatagacacaggtcaaaggtaattttgggtgaaaagtcttaggggggggaggggataacaacagggaacataaagatcccttgggacagggaagctaggaggagttccttgaacagagatacaaagagcaagaaggagccagttcagaggacatgggcctagcacacaatagcaagtacaaaggccctgcagcaaagccatctgtgtgtgctaggtgtggccaggataggggtgggggaggacttgtgcagactaggggacaaatgatggcgtgaggtgagcagacatgatggacatcaacagggatgaacgagttccaaatagagccattcggcttgttttgagctgtgtcccatcttctccagagcattgcctggtggccctggctgagccagcttgtgtttctcttgtcactcacagccacatgacaccagagtccctagtcatctggtggccatggggaatgtcatcgactccgtgtggtgctgggtacacagccgctgagccagcgcagcgccatggagggtgactaggaagcgtttcacctccagatgtgcctcatgcactaaccctgcggccaggtgctgctcactccctcggtgatggccaggcgctccgggcgaatgagcgcttctttccatgtgctgtaaatgtgggtaaatgtgctgagtgtcgtcagccttcacatcactcatctccagttccagaacattccctaagaggagccttcccccgcccctgttccccattgctgtgggtttgtctcttcagtggtctggaacgggctcctgtgcagaggcctctgaggctgccagctttcccaccttcaaccatgcagtgcctttgtggcaatcttcttgcctcagcttaccgagtagctcagctgtttttaatcgatgaatgtgtcatcttacagataaaccacacttggcttgcccactggtcaatcaatgcatgtttgagtcagacccagaatttgaccactgagaatgaagaatggcaccattagcaacaccatggacaaatctgtctgtctgtctgtctgtctgtctgtctgtctgttctttgagacaggttatccttgaacatctgattcttctgcttcccaagtgctgggatcttagatatgcaccaccgtgcccagctgtgtcaggctttggttgaccctcagccccctccagttctcttctgggtcagtgtgtagcagcaattacaaggcctgtctatcagtattgacctcagaaactgccaactgacactgttaaaggcagccatggcatctaagtgtgtgatgacacacacctgagcacttgggaggcagaggcagaggcagaggcagaggcagaggcagaggcagaggcagaggcagaggcagaggcagaggcagaggcagaggcagaggcagaggcagaggcagaggcagaggcagaggcagaggcagaggcagaggcagaggcagaggcagaggcagaggcagaggcagaggcaggaggagctctgtgagtttgaggtcagccttttctacatagtaagttccaggacagccagggctacatagagagaccctgtctcaaacaaaaccaaacagaacccaaaacaaaacaacaaagcagccatgggggggggggcaggggagggctggagagatggctcagtggttaagagcactgactgctcttcctgaggtcctgagttcagttcccaaccacctggtgactcacaaccatctgtaatggcatctgatgttctctccatgtgtgtctgaagataatgacagtataataacatatatcaagataaataaattaattaaaaattttaaaaaggcagccatggtcttgggattctcacaactggataataagggggcctcgtgttgacccattcaccagaggaggaaactaagacctcaggggtgggactttcctgtcctactggtgatgtgagagcctcagggctgctagattccaaactaactaaaaggcagaaaagatatggagaggaaggagcaggccgggaggggagagagaggggacagggagagagaggaagagaaagggaaaggtgtgggaagagaaggaagtttgtctttaggccgggctccacctcctcatgtgccacctgcagaggaagctgaggtcagaggtgacagtgtcaaaggtcttcacctgttccccgggcctcttctgtcccttcctggccgagtgacatggggaaggttgttcacctctctggccctcttttcacatcaaacagtgggatcgtgtgtttaacattttatctttgagttcaaggctgtccagtccagccttgaactttccatcctcctgagcgctaggactacacgtgctagagctcctcggtgacacaggaggaagagcgtcccccaacccaatgctcttggtttggatggagctggggacagagaagagtctgtcgcctctggaatctctccatccgagtctaagatgggcgggtacaggccatgggctgggaggaatgggctgccccatgggaggaagtgatgctcaccttagaaattccatacccagctgcagctgaaggttctggatctgaagcaggtgatggttttctcaaaccatctggactccccggtcattgaaagcctgcaaggtccccagaaccaccgtgtgcttcagtcagaaatactaactgtgacctcatcacaagtggactcccatgttggaactatgggagggacagcatgaccactgatgttccacaggcaaggcacagtgtgggtactgggtggagtccccaagcctagtacatggttgaggcctggcatatctagggctcagggaggaccacagggatggctctgagcatcttttatgtgccaggcaagtacaaagcaacctggaagtggtgcccagagaggtagagacacttgccaagatgtgcacagctaagaagcaactgaatgtggctcagaacaaaaatgatgccacaccattaggtgttgttgttgtggttctggtcgtcgttgttgttgttactggtgcatctgtgtgtattgaaggtcagaggacaagcttcaggggtcggttctctccttctgctgagtgtttcagtgaccaaacccagtcttgcatgacaagaattttacttaatgagcatctctgcagcccacacccccatggagccttgctgatatgaggagactttgtcctagctgttaaccatggttttctgggtgtgcttggatatctcagggctctggggctgcaacctggggtccctcctgcctagggtcacccaaacattcattcacatgtcctgattcccctgtgaaggctcagcctcccccagcccgcagcttaggacttgcctggcaagtgctacagtcaacaacagcaccagttctgctgcgtgacaagcatccccagcatccagccctggaaagtgaggccagcctggcacatccgtggtaaatggtcatgagtaggcggggccgtgagtcatcctgttaacctactgctgtgggaaggggagagcccctggccacgttgcatggatgctgggctggaggccacacatcaggccgaggctggcaggagcccagccgccaggacatggctgcagaacctgaggccagactcctgagtcactgtttccccgttgttgccaaaccaggcgggaaattgaggagccagggtggagccagggaggggaggctgtggggagctgagatctctggcttagcccttgttgtacaggacagatacaaagccaccagccagatagaaaagggggccctgtggtactagagtggggtctggtacccccaggttccagctccctcaatcctcccatctcccagcgtctcccttcccatcagccacacacaccattgtgcttcacgcgtttctgtttctggagtttattgaatgggttccgtacctcagtccctttccacctgtagtctctggaccatcctgaaggggctggcttactgttgtcgcagagccgtgtcctgtgtcctcatcacctggcttttaaagtgtaaccttcctagtccgttcatttgcttccagcttctctagcttctcattagtctgcctggatggttctgagaatgcacagtggtcaggctctgccctggacacgcaggatagagagaacagagtggactgcccacctgctccccggagctgatgctttagagcaggctgaccgtgacagggtcagcagagaaaatgacggcagcgtgggtgaccagtgcaaaggtcctggggcaggattacagctggcatgatatgggggcagctgaagccagtatgtctggagctgggggtggggggaggcaatgaggtcagcaatggtgcaggtggattgagccggatttgagtcttgatctgacaggtcagggagccctgggggtcctgagtagaggggccttggaggtattaagacctggttagatttccttagactcgggggacgatacaccatggtgcccagacctgaaggcagatggggcttccatctttctcagcctccaaggatggtcagggccaagcgcagggggtctgtctctcacagatgcagacacagacactcctagagacacacagatgcagacacacacagacacagagacacacacagacacagtcacggagacacacacagacacagacacggagacacacacagacacggagacacacagacacagacacagagacacacacagacacacacgcacagtcatgtacacagatacacacagagacatatgatctgtctcctgtgatggatatcccccccacccccccatgatgcctatggaatactggtcagcgctcagccagtgactcaccaggacttgccctcatcggagacaatcactgcctcttcacgtccagaccggaaaccacctctgacctgccagggagacgagagctgggcagaaagggcagaagagccctggactcagggcaggcagcctgcagggaaaagtccagagaagacccccaggcttgccaccagccttgtgataccctcctgggctgaggtagcactgggaaggtcctgacagaagtggtgaagtgcttggaccctcacagtgtgtcacatccacccaccgtgttttcctctttcactgtggtctctggtctgttctagcatcttccattgttttctactctgttgtcctacttaattgaaaaaattttattgagcatctactatgttccacagactagagtttgtttttgtttgttttttagataggatctctttatgtagccctagctgaccaggaattcagagaaattcatctttttctgcctctcaggtgctgggccaccccacctggctttaccaagtagttattatcatcatcatcatcatcatcatcatttactcttttgggttttgttgttgttgttttgtttttgttttttagataaagtatctcttgcagaccaggtattctcaaactttttcacttctgtttttaggtttttgtttttgagacagggtttctccattgtagccttcactgtcctagaacttgatactgtagcccaggttagcctcaaactcatacaattcattctcgctgccttccaagcactgggattaaaggtgtgtgtcctccccacctggctgtcactccacccagctgcaggtgaaggcacgactacagctttaaaggcatacaagtcctggtgacagcctggaagccaaagagaatgttcttacctcgtacagagtggtgagaattgaaggaggaggggcaggtgcctctcatggtgagtgaaaggggctcaagtcgaccattgagcagaatcctgaagggagtggggaggaggagggagccctgtagacacccgagggacaggaaaagcttccagccaacaaaaacagcaagtgcaaaggccctggggctggaatgtgtttggtgctttcagggagcattcgggaggccagggttagaagctgacaactaaggggccatccaggacagcaccgagtggagctatgtcatctgcttgcttcccacactttaaaggcttcccaggatcatcttgccttttcaatcagccccagtgaccagctcagccctgaggatgtgtgggcaggcagaggccagagctggacctggacacatggttgctcgggcttccggcttccttcctgacctggtcagctgtccaggcctaggactgaggccattcagtcctctgccttctgtcagcctgtccattcgtccccaattattcctcagctgcaaagtgacaaatggctacaggagggctagcaatgtgatcagtgggtagagcgtttgcacacagcgggcatgcacacagccctgggatcccctgcgtgtgctaagtactggggagctggaagtaaggaatcagaagttcagggtcatctacagtccttgtctccagaaaaaggaaaaaaaaaatgattattgtggtggtgcacttctgtacttctgtaatcccagcagttgagaaactgaggcaggaggattatagtgagttcaaggtcattcctgtcctttttttttttttttttttttttaggtttttcgagacagggtttctctgtgtagccctggctgtcctggaactcactctgtagaccaggctggcctcgaactcagaaatccacctgcctctgcctcctgagtgctgggattaaaggtgtgtgccaccaacgcccgggcacccctgtcttataagagcaagaacagttgtagagctgcctgtgtgtacacacacacacacagccacaaaaggggctcatgtggttcttgaggccaagtagcttgagctccagtgggtcctgctggcctggcaggtggtcctgtctcttcctcctgtgtgagggatgcaggtgtgacaaatgccaagcccctggctcaagtcacacagggacatttggcatcagctctgagaattcagggcccaggaagggaagagccttgcttcggaccatccactgggaacatggctgaccccagactagaacctcccagactcctctgccctcccagggcttgcaagctgattctggcccggagggagcactgccaggcaagtgaaggaggcctctggaagctcagcagagcccaggaagcgcacggggctcagccactcactcaggatgcttcctcctgtgacaacagcacctgttgtcccttcccctgcattcagcagggtcagatactccagggcctgcaggtgctccagagacggaagggcggggcaatggggaagtggccgttgccatggaaaccagacagactgactagggttgggaagcttgtgagctaagacatttagatagttcaagacccctggaggccaaaagcttctattcctcacctctgtccctcaggggctctggcttggccttaggattcccaggggtgtggtccctgcctgtgggctgtcagaaccatgggatctctgggcaccttagagaagtccccagtgccctgagttcagtgccctctgggccacacctggggacatgtacagggagagcaaggagaggctacaggagagccaggcaggacagcaggaacgggcctgggaaactcatctcacccaacttctgctgctgcgaggaccttaatggttaaaaggctttcttcaagaagcctctgccagcctgataggcgggcaggcgggtgggcgggcaggcgggtgggcaggcggatgggcgggcgggcaggcaggcgtcagctccaggcgggtggctgctggtacctgtcgtagcaggtgtcagtacccacctgaaaactccaacgtggccaggagggggtccagaagaggctgacgtggcaagagaaggcggcagggatgatacgccatgcttcatgctcgcttctgtgcacccagttcccaaggctcagcctgggatactgtagacacaccatcaaacttgcaaaatagccgggcacagtggggctcgtgcctgtaagcccaacacttgggaggcagaggcaggaagatttttctgttaattcaaaatcagcctggtctatgtaacaagatccagcttcaggatagccaggactacataggaaagactctgtctcaaaaagtaattaattaattaataaaatggatttgtaaaataagccagggtgatggttcaagtgtgtgattcctggactcaggaagctgaggcaggaggagagctttgagttctagatcggcctgggctatagagtaagactccttgtcctgtcaaaaaagaataatcgtggccgggcgtggtagctcacgcctttaatcccagcactttaataccagcagaggcaggtaggtagagcttggtgagttcgaggccagcctggtctacagccatagatccaggacagccaaggctacatagaaaaactcttgctaggaaaaaaaaaaagaagccaggtgtggtggagcacacctttaatcccagtacttgggaggcagaggcaggcggatttctgagttcgaggccagcctggtctacagagtgagttccaggacagccagggctatacagagaaaccctgtctcgaaaaaaaaaaaaaaaaaaaaaaaaaagaaaagaaaagaaaaaaaaaagaataatcgtaaaatgttaataatttttttttttttaaaaagcataagacactacctgctcatctcctcatgagggaaagtcactttatgtaacaaagaaacttcacacagagaggtttaggaatttgcccaaggccacacagctaccaagtggtaaccaggacttgaacacaagcttatttgcaaaactttcccttttaatttcactttagtttttccatgtgtagtgtacatgtatatacttgtgtgtgcatgtgtgtgtgcaggtatatttgcatgtatgtggaggccagaggttgacactaggtctcttcctcggtcacttccacttatatattgaagcaggcttctctccatctgaacccagagttcacctttgccttgttacctggccagcctgctctgggaatccttgtctgtgccagcccccgggccagcttgccctccttaagtaggtgctgggggtttgaactctggtccgcatgcttgccatgtagacactcgagccaccaagccatctccctagcccttgtttgatatactaattaattaaattgtgagatgtcctggaattccatctgaagcccaggctggacttgaactcagatgttcgcctgcctctgcccctgcccctgcccctgcccctgcccctgcccctgcccctgcccctgcccctgcccctgccctgcccctgcccctgcctcccaagtgctgggattagagtcatgcatgcatcaccactgatcaagctcagagactgagcactttatcactaagctatacccccctcccgttcttacttttttattttgagacagagtcctacaaagttaccagccttgaacttctgattttcctgactctctcaccctgtgtcatcaggaataacagctgttccatggactgggggcggagtccacataagctgtctaacttggttttgtctccgtgtctatttttacctggcatacagtaggtgatcagcgaatatttgtataaattacaaacaccctgagaagttgcttctctccaagccccagcttactcatctgtgcaatgggtgcactgcaggataactatggtatccatcctaatggttgtttggggacagtgagatttaaggtgactgaactatgtccagttctggtccgtctagctgtgtgaccctgggctttctctcaacccccaagttctcatgcatgggatggggtttggatcctgggacactgaattctcccagatctgagtggacagcagccaacttgaggctgaagcttctaaggtgatgcccctggccctccatctacccttcagggtcccaaagcagccatcaccctagaatccttcaggcttcctgggcaagctccagggttgatgttcacgcctggacctctggggtggtctactgaggccagcctgaggacccctgccacaccttctgagtaccaggcatcccatgagatgggaagcctagaggtcactcacatgcagatgggggacacagaggctcacctgcagaagccgcccctcagcctccctttctcctctcctgtctgttcatctctctcagcttggaacttattcctcacagtagaccacctactcctgtgccctccctgccctccatggcctggcctcatctgagatgtaccagaggtggcatcactgttactttgctggtagatcctgtgtccccggttgtaacatcagacaaaccttagtcatgccttctccccacaccttgcacaaggctccacaaaccccttcctatctaatgcacttggacctggctaaatgccagtatacagcaggcttcagcaaaactgctaaagtgacatcaactccctatggggacacaaggtgaaggagctggaaagacattgggttcaaattctgcttgctgtgtgaacttgggcaggtgccctgatctctgtttctgaacttccactgccaaaatcagagattcactgtgcacacacacacatacacacttacatatacacatacacactctctcacacacacactcgcacacacacacacactcacggacccccagaattgaagggttctagacggctggctgatggggagctggggctggcgggattctcagggagcaggcaggcctctcccacctgtgtgtcctccccaaactatcattacacctgccccaggtcacagaaaacactcaaggaggagatgagggtgtgagtgtctctgagaacaaccagccattgtgccttgtgggtgtggagggcttgtgggcagtaccttgggaggagaccacagggcctgatggtctcagctggggggaggggaggcggggcagatgcagggcaggtgccgggcaggtgtctacaagcatcttccagcatcacccctaggaaagtgccctcatgtgtgagccccagaaccggcccagctggtcagacacctgccccggtagccatcacaggtgtaagctgggggttgggctgcaggtggggagtgggactcggggcagggcctagggaagtctggccccctgaacaaccagtcacctccacctcctgttccctcatccatgagggagctgcaggtaggcctagtgcatgagcagaggccacaccccgtgggttttcctgacacagggatgctgctgggggggatggggtgggtatgatcaagcttttggcttcctacaggtctgtctccagggaagacttgatctccactcccctctctctctggagggagggatgaaacagtgtctcacgcagcctctctaggctggcctggaactcacgatgttctgagagcatcttgaacttctgattctcctgcctcagcctcctaagtgctgggttcacaggcttgtcccatcacacccagacaaagatttttatctttcactcaagaagcatttgttctactgtgtgtcagctaggagctggggccggtactgggggatgaggtctctgcactgaggaaggagggaggtcctgcgagccttccagcctgggggtgaagagaaagagtgatccagattgatggtcatcagatggggtggggagggctactctgctccaggaggagaatagagcaccgtttaccaaggggagggggacaatggtggtggtcccaggtcagggccagcctgggcaacaagggccagccaagacagaaatggtcgtaagctctcagtttcaggacccacccccactccagcctgaggggctgctctgttcccaggagccaaggccaagggccaagccagaggaaatggggctgaggcccagcagcaaactctccggggacagctaatatctctgagtggcactgacaggacacagccccgggtggcagggtgggggccgggctctccataaacagccaagtctcataaagctgatcaaagcagtgggcctgtcccagccaggctgcttcctgcaggggcccagaacccccggcttgtgggggggatgcaagggggacccaggaaagcctttttctgtcagggggctctatatgtgtaagggcaggtccctgggcctctgtttcccgacttgtcttacaaatctggatacctgcagctcctgaacagcctgtttctggaacagaacacagtcccattaccttgtgacctcagtccgtggcacccctcccccgcacccctgtcctcagctggaagatgggggagccatcgtccctctttagaggcctcaggctgtagaatttttctcagtatgatttataattacagttcattatttgttgggaacagcactgactgggccctcactacatggaaaggctgtgtcctccccgtgaggcttaggggtgtggtacccacaacaggcagggcctgatgggaagaccttttttctcatccctccaggcctgactctggtgtgtctgtgcctcagcctggggattctgggaaccctggggcatctcaccagaacttggggcccctcttctttgcagttagacagaatggggagagccgaggactatgttgtgagcacaggcctgtaatcccagctgctgggggaggctgaacctctaagccaggtatggtagcatctgtgtatattcccagtactctggaggcagaggcaggaggattgccaaaggtttgagtccagcatggactacacagtaccaggtcagttggactagcaagtttttgtctccaaaaatgaaggagagggccagccatggtggtgagtgcttttcattcatctcagcacccaggaggcagagacagaggcagatggacctctgagttcaaggccagcctggtctacagagtgagttccaggctgcggctacatagattctgtctcagaaaataacaacaaaaacaaaataagaaagaaagtaggagaggggtggggaaggcctcatttcaaaataaaacctaagccacgtagtggtggcgcatacctttaatcctagcactaagaaggcagaggcaggaggacctctgtgagttcaaggccagcctggtctacagagcaagttccagaatagccagggctacacagagaaactctgtctggaaaaaaacagacaaaataaaataaaacctaaagagaaaggaaggaaggaaggaaggaaggaaggaaggaaggaaggaaggaaggaaggaaggaaggagggaaggagggaaggagggaaggagagagggagggagggagggagggagggaaggaaggaaggaagggaagaaggaaaaggggtgactgtggctgtaattggtggtggggtgcttgcttgaggccctaggttcagtccccagcaccgaaaccccaggagagtgggaagtggccacctcccaggtaccctcctgacagctgggatatcacactttccctcccccatcctcctggccctccctctgtgccctccagtgtgcactggatggtgaagctgagtcagatctcagttctcttctgctcagagccccctctggctcctacctgatccacagagccagaattcccaaagctctaggcccagtgcaaccaagtcctcagctctgtccccagctcctgacgtgtggcaggcaggacagaacctggagctcagggcagggggtgctgccacccaaaggagcaggggtgaccagaacctaactggaggaaagctacggagtctagggtctcagcagggtcagggcatggagtacctactgtgtgccaggctctactgtaagtattggatggtaaaagaagagccttggggttctgcacaggcacccattgtgagagggacccaagtccccaggaccagacaatagatgtctggtgacagagccatggccctggatgtctgtcctctgggtatgagctgggtactgcatttccctcagtacagtgtggccacagcccattacacagtttggtaatgtgtgtctctctctgtgtgtctggtgactggggacaggccctgcttcacttttagaacccctaaggggtttccctggttgtgggcaggaggtctggttgtttgttttgagacagggtctcaggctgcccaggttggccttgaattcatcatgtgtgggaggtgagctttctatctccccgcacccagaccgctccaagtctgtgtcttcccaccatgccaccctcccccatcctgtatcagccatgcccggaactgccagtgatacccaggaataaatcggttgcaggttggcctcctttactgaggggaaactgaggcataggaggaggagaagcgtggcccagggaagaattggaaaccatgtgtagaggtcctggaatttgtgtgtgtgccctgggggaaggagggagggggctgtaggggggaaggagggagggggctgtaggggggaaggagggagggggaggaatgctgaggtgaatccagagccccttacatgctgagcaagctttttaacactcaggcatcccctgtcccctgtccactgtcttctcagagcccggccttgccctccccttcttcactaaggtcacaaacagctcagtgaacgaaaaacatgaaagagaaggctgggcttagagggccacagccgctgcccaggtcacacagcccgaggtagcagagcttgtttgccagtgtttcgacaagtggtggggagacagaggccaggaagggcaggccctgcctgaggtcaggcagcctcctgggcccggtctcccgcagaagctgacccagagcaggagatctgactcaaaaccttcttccagagtcttcccacggccctggtgggggtgggggaccacttggcatttcctgtttgtttgggcagggcccaggcaaaagcctgaggagagacacagggatttcatggtcctgccactcacgaaccaggcctctatccagaaggcaggggctgggtcccacatcctgggttctatttgctcccgcccagttcagccgggtgtccctgctgtccccaccctgaccctagagtccttgtctctgatttccccagtctgaggatttaccatccgacaatccaatgagctgacctcaagcccctgggagaccccaaggccatgaacaccacttctctgtgcctcagtttccttctctgttaaacagagtcattgtgagggtgaattgagggttgtccacacagcctttagggagctgttacccaaacagtgggtcctgactctgaccaaacatgctgtttcccagataagaaactaaggccctaggatggaagggaacagatataaggactcgcagccagtggaggccagtccacctccagaccctaagaggccatgtgatgctaagcaggcacacaaaagataccctacacaagaactttaaacttctgctctgccattggctgactgtgtggcccctatacagcttactgtatgcctctggtcctcagttttctcttctgtaaaatgggaggaaactaacatgagaccaggacttaaagaactggtaaggaagaggctgagcctgagcctgaacctgagcctgagccagtgactcacacagtgttcttcccagaaggaagcatagaccgtgccctgggtggcccaggcagctggaggaagcccccgatctccagcccaccccagctggctttgttggagagccaacacatctacagggtgactgtcctgtttatgctccagggtggcctagctaacagatcttttcccgcccttccccctaccaggctgttactcaatcacggtggcctctcccagctcctcccctctcgaccctgtcaccttccacaccagcaccttcgcgtctctctccctggtccccccctccgtgttccgcccccactagatctgattcttattgactctcattagagtctaaaacagcgtcttttaacagatgaagcactccgtaaatatttgcccaacaaaagaggatgctttactgcgtttgcccacgcagagcaggagtcaaaagcagagagccttgtgcacgctatagaagggttctgtagtgagctctaccctgtagaccaggctgggctgaaactcacagggatccacctgcctctgcctcacaggtgctgggattataggtgtggccaccacacccagtgcctttcttcctttttgagacaggtcttgctgagttaatctatttacatttaaagttagtactgggccatttcagttaagggttcgaatgaatgaatgaatgaatgaatgaatgaatgaatgaacgaactccaggctgctgggatgggtggagattgaggctttccccagctcccctgggcaatccaggtaggaaaacatgaagctaagctaggattggcccacacctctgcatccaagcattctgcagcatgagagctgtgggttcaaggccagcttgggctatttacagctagatcctgtctcaaaactgacaacaaccaaaaggaacatggtaactcaggtgtggtggcacatgcctggattccagcactcaggacgtagaggcaggacgaaataagcctggtggtgggcaggcaaagtctctgagttcaaggccagcctggtctggagagagagagagagcgcgcattctaggatggctaacaccacagagagaaaccctgtcttgaaaaacaaaacacagttcaaaaatcatagtcagcttcatagtgaattttagtttagcctaggctacatggggccctgtctcaaaacaaaacaaaacaaaacaaaacaaaacaaaacaaaacaaaacgggctggagagatggctctgtgggtaagagcactgactgctcttccagaggtccttagttcaattcccagcaaccacatggtggctcacaaccatctgtaacaggatctgatgccctcttctggtgtgtctgaagacagcaacagtacactcatatacataaaataaataaatctttcaaaacaaaaaaacaaaacaaaacaaaacaaaaaacccccaaaacccaactctactaccaccgtatgtatatgtgtatgtgagtttgtatgtatgcatgtatgtatgtatatgtgagtatgtatatgtgtaagtttgcatgtatgagtgagtgtatatgtatgagtgagtgtgtttgtgtgtgagtgtatatataggtgtgtttgtgtgtgtgtgtatggtgtgagtgtatgagtgtgtatgtgtgtatgtgagtgtgtgcatgtgcgtgtatgtgtgtgttgctcatcctgcctgcacagccagcagcatcaggttggtgtccctgggtctggagtgcagttggctgtccccatttcccctgtgacctggccttggccttgcctttcctcttagcttgcattttacttcctcactgaaagcttgggtcccagcggctgcttcctaccttgcctgccgagagaaccaggcgcagcagctggggtcaaagggctccgcccaatgcccagttcactgtgagcaccgggccagggtcagaacccgcctcgccgcggcctcagttcctccttttgtaagggagactgaacagcatttcctcctgagagagccgcgtctgctccacccacaccatccccttccacctcagagcaaatggggcttcagagaagctgaccgccatgaggagagagggacgtcggctttatctccccacacggggaaactggggatcctgagaaggtggtgaccacaggcacagcattcccacgcacctgccatttggtccgagcggagcagctggggccctggcggctgggggaaaggtgcatggccctgggggatcctagcagcttcggagatgtttcctgatgcctgcctggaaggacttgctccctcccggcagaggagaaacccaaggccaaggggcattcccactggtcaccggctcccaggggtggcgactgtcttcctgcctctgccccagctttgcccctgctgggaaagttcttcctctagtggcctatagatctgcccccttcccagtgcagcacacacgtcacttcctcagggaccttcctgaccaggcacttgctcagagccctgcgggtttccgctttcacaaggagtgtcctgctcagcgaaggtctccttccaagccgactcagcctcagagctctgtacctcagctggtgctcacctgtcctgtggggtgacccctgcccccctctcaccatctacagctgggccattgctaaatccactccgttctaagaaaagggagtgtctactgtgtacactgtcgaacccctggggctatgattagtgcccagcacacagtaggagcttagcggttatttgggaggggtataaatcactactattattttgttccgtttttttctttctgatttatttatttagagaggatctcaagtagcccagaccttgaactcctggatcctccattttgggattacaggtgtatagaaccacacccagcttttgttcagtttctcatttccttgtctggtactaagtgtccactggcctgggtttggtgactaggccataatccccaaactggagaggttgaggcagaagaattgccagaagaactttgaggccaacctaggctacagaataaagttagcctgagctacatagtaacaccctgtcttttattaaaaagaaaaggaaaggaaaggaaaggaaaggaaaggaaaggaaaggaaaggaaaggaaaggaaaagaaaagaaaaaccaggcagtagtggcgcttgcctgtaaaaccagcacttgggaggcagaggcaggtggatttctgagttcgaggccagcctggtctacagagtgagttccaggacagccagggctacacagagaaaccctgtcccgaaaaggaaaaaaaaaaaaaaaaaaaaaagaggacaggtgccatctattctgctcagaatagttggtaacaaagtgacaagcagggtcctgcccaaggccaagagtttctagtccttggaaacgaccactgtcagagaaggtgcagagagaggcgcctcatactggtgaggctgtcagaaagggtctctggcagaagctgggactgacccaactaccccacccccagctgtcataactgtgggcagctggagttgccaaaccccaccacagctgcgtcaccaagggccaggaggatccaaggcagagggggactgggcagggcccacacccaagctggcttcagccgcagaattagccgaaggcttgcttcatgtccactcttagtcactctgcggcagggctacgtgggcacttgctggaatggactctttaggcttgcaacaaagttcgggaacggtgtttgagctccccccacccccatttcccagaggacagaaagctgagggcctgacaaggtcatgggaaccctgagatttctcttacccctgtggtcccctccttccctccctccttaacctgtgtgtatgccttcctgggtctctctctgtggtgtgtgtgtgtgttctggactggtcatatcattccgagccccagcttccctgtctataaaacaggatgataacagtcctctcctctcctctcctctcctctcctctcctctcctctcctctcctctcctctcctctcctctcctctcctctcctctcctctcctctcctcccctcccctcccctcccctcccctcccctcccctcccctcccctcccctcccctcccctcccctcccctcccctcccctcccccctctctgagacggggtgggggggggggttcctctgagtagccctggctgtcctggaactcactctgtagaccaggtttgtctcaaactcaagagatccccctgcctctgcctcctgagtgctgggccccactgctggcctcattctcttttactttttattttttcatgagtattgacactcaccacaaggaccgaaggttcagggcaaggaacccaagagccaggacatctgcccgaggctgctgtcaagccgtacgggtttctgtccagacggaccaactccacctccagtcaggctgtgctgaagggttatttctgagtgatttatgagacacactaactggccgcctctgtccctgtccccgaagatctgaaagctgaagcttcccggccgctgtggttgtggggactgtcacagatgctgtgcatggggattctggaagtgcccaaactgtgtgtgtgctgcactgcagggccaaagtcccatcctcaaggctgcgggtaagatcctcactgttgaccagctggccctggagtctcccaagggtggaggcattgtgctcatgtctggtcctcagaaggggagagagaggtgtaccaacattttggcaaggccccaggaaccccacacagctacaccaaaccctatgtctgttccaagggccagaaggcttgctgaagggctaggctaggctacaaaaactaaccctggatcttactgttaataaaaaagcttcatcaaaagatggcctagtcggccatcgctggaaagagaggcccattggacacgcaaactttatatgccccagtacaggggaacgccagggccaaaaagtgggaatgggtgggtaggggagtgggggggagggtatgggggacttttgggatagcattggaaatgtaattgaggaaaatatgtaataaaaaaaattaaaaaaaaaataaaaaagcttcggggctggcgagatggctcagcaggtaagagtattgactcctcttctgaaggtcctgagttcaaattctagcaaccacatggtggctcacacccatccataatgagatccgccctcttctggtgtgcctgaagacagctataagtgtatctatttatgataataaataaatctttgggctggagcaaacagggactgagtgagcagggccgaccagggcaagcagaggtcctaaaattcaattcccaacaaccacatgaaggctcacaactatttgtacagctatagtgtactcatatacataaaataaataaataaataaatcttaaaaataaaataaaataaaaacaagctgggcagtggtagtgcacacctttaatcccagcactcgggaggcagaggcaggcagatttctgagttcaaggccagcctggtctacagagtgagttctagggctacacagagaaaccctatctcaaaaaaaaaaaaaaaaaaacccaaaaaacaaaaaaccaaaaaaacaaaaaaccaaactcaaactcaaacaaacacccaaaaacaaataaaaaagctttggatttttgttttgttttgttttggtttttggtttttgagacagggttcctctgtgtagccctggctgtcctggaactcactctgtagaccaggctagcctggaactcagaaatccacctgcctctgcctcagctttggatgttaaagcactgtagctgtttttagacatgccagaaaagggcagtggatcccattacagatggttttaagccaccatgtggttgctgggatttgaactcagaatctctggaagaacagtcagcgctcttaactgctgagccatctctccagccctctctttttcttaataaatgtatattcattctgtttttaaaacaaccaaaagaaagtggtgatggtggtgcccacctttaatcctagcattcgggaggcagaggcaggcaggtgtctgcgaggccaggatggtctagagtgaatttcaggaccagtgctctcagaggccagcaagggttttggagtccccatagtctcagatggttgtgagctgccatgtgggtgctgggacctaaacccggatcttctggaagagcaaccaatgttcttcaccactgaacatctcctcagaccctttttatttttttttgagacaggacttcacagtgttgcccaagctgccctcaaattcataatcctcctgcctcagattaggtggaactgagctgatggttctggtccattctggttttgcctcctgcagggtttgccctgtacacaagacccaaagtatctgcttgttctccaacactggcacctggaagggtggctctgtggagtggatgggcactgtggcctggggcacaggctatgggaagggaggaaagtccattgggtatagtggacactttataaatcctttgtgtcatctgctccttcctaccccctcttccttccctgcatgccccagggacttgactttgagccaagtcaggttgggtccccacaccaatcccttcacttactttttctttacatttctgggatggaagccaggacatgctaaacaagccttctaccaccaactgcatcccaccccgtaaccctctgtctcttttcttactttgagacaggatctcactgtgtagccctggctgacctggaactccatatgcagaccaggctggcctcaaactcacagagagacacccccacccacccccactcagctggtcactgagattaaaaacacacactactcagcccagccctgtgctgactttttattttgacacaagccttttattcagttgcctaggcaggtctaacctcactttgtagcccaagcaggccttgccgtctgtcatcctcctgtctcagcatcttgagtggctggcatggccaactgcatcattaggtactgttagagcacatggcaggctctgctgtaggccctaggacacatgaacaaggggcatggaaagagtccttgaaaagccagcgtcgccaaggatgtcctggtcctgttccctgatagtggtgctggccagagggggaagtgtgtgtgtgtgtgtgtgtgtgtgtgtgtgtgtgtacgcgcgcaagcacaggggtacatacacgtgagtgtaagtacccatggaactcagaggggggcatcagatgtcctgaagtgggagatacaggtggctgtgagccactgggcatggctgctgggaactgagcctggtcctctgcaagagcaaccagtgctctcaattgcaagtgagctttccagcccctcccatgctgctctgctgtcctctctctggctggagcaggagcttgggctgggggaaggcggcacaaaggaagccggaggagtctcgaagtaaggaggctcggtgaggacggaaggagcttcatggctgcatgccctgaggtccctggaagcaagcctaggacatgggattgagggcaggggtccaggtcagtatcaacagcacctccccatggaggacattgggcggatggccttcatcccaggaaatggtcaccatggtgacaaacagccccttctgggaatggaaacacccccacagccctaccactgccacagatgtcgttgtctggccagcccacagtggaagcaagccagctgtgcaccactggaggcctggcaagacaccagatctctccagaacgctctgcagcccagggagaggcaacatgatgagggcgtttgggactcagccctcggagctggagtccagagtctcagctctgcctgtcaacttgtaggatatcaggcaggtacctgtgcgcttaagtctcctcttatgggacagagatgataagggcggcttccccatggaatctctcacccaagtgatcagtgcatgggaaacagtcagacctatgagtgcacagcaggacactccatatccccccccccccccccccgtgccgcagcctagagctgcactgtcatgagtgtcatgagctgcaggattcatcctgggtgcttgagggacaggtaggacagagggttgtccctgtgagcaaagagggagaagccagatgtggtgacgcgggcctagaatcctgacactcaggagaagaggaggaagacagttctgggctagcctcagctatcggcaataatagtctaaggaccagcaagtatgcctcacatgtagagagcttgcccagtatgggaaagtccctgggtcccattcccaggactgaaagaaaaaaaaaaaaaaaaaaagtctggagctgcagctcaggtggtagaactctggccccgcatgcatgaaggcctggattctgtccctcacagcagaaagctgtcatggtgactcaagcttgtcatcccagcgtacaagaagtaggaagatcagaagttcaaagtcatctccagctccacaaagagcttgaacccagcctaggacacacggagcccaatcctgacacactccttcatcctgctacaaaaaagggaaggttcccatgagtgggtgttcccaccccggcgagagtccctagaccctggtgacaggggttccctctgtccacttctgtctgggcttcgctaatggagtcagtatttctttctgtccactttcatattcggaaaaggcatcctcccctcgggaaagccccagatcctggcccgcagccccacccagagccctggcctgcttgtggcctagttcctgcctctgtggatcgtgggattctgagccgctggcctagaagcaggacctagagggagagaggggacttctcagagaccaccccccaccccccagctcagcctgggatccagcggtgcaggggtgggcggtggatcacggatgagaacttctaataccccttggcctagctgctaatcacttccagattggtcgggtcagggccagggctgcagccgccggctccataaacagcccggcattccagatggcggctggctccagcctggcgagcaggttcctgggatcagggggtgtagcaggtggaggaccctccccaccagccagcttcagagccccagccggttagggaccctgggtcagaaaggcagcttggagaaggaagctgttggtcagagaagggaaactgaggccagaagaagcaaaggaggggacagagaagcaagcatgcttcagtcctggggatcccagcactcagtagacttgcccactgacagagacagggaggagaggggtccaggcccatccccctccccagtaaagtacgcagctcccctctgggcctcaatttcctcttaggtcagccgggaaggctgaagttccacaaagcatccaagctatgctgggtacacagctgccaatcatcctctcctcatcttctagcctgagacatcgaggcctcctcttccaggaagtgccctgactgctcccacacctctccttttgtgccagccaccatccaatcggtggtgtcttagagtctctaagaaaaaggaggaggaggaggaggaagaggaggaggaggaggaggaggaggaggaggaggaggaggaggaggaggaggaggaggagagaagaaacaagaggttgtgaggcagcagaaatgtgctgacgctgcagtactgaagccaggagaccctctgtttcctcttagagcagatggtgaggtcccagcctgctgtccccaggctggaaccgtgtaatgatccaccagaggaagggacagagaagccagccagtttcccaactaggcaagaatagtctagtcccggggtagcccctgccagacgtgatggggtctgctctgagaaacgacacagcttctgagggcctgagcccgtttccacctcctcagcctagtgtctggcacacagtggtggccctgggagagcccgatgggactagccatccggggagctctaggttgtgcgagttctcttcccagcactttgctcatggaaacttctcgaagctctgagtgtaaggcagctgggtgcccagtctgaggcccagagaggcggtgactttctgaagggcacacaactggagcccggatctcatccctataggaactcagggataccttgaggtctacgtacccccccccccacacacacaccattccaggggggtccgaaccacagtcagggcctggctggggctgggggaacacttcccagagcccccctccaccgcaacctgcgcccgccccggcttcggatttcagccagccttggggtgaacggcctgttctgccctgtgcccgggaggaatgttcgcggtggcatgggcccgggtccgagaagaaaggcagccttgtgggcgaaaggtgagccgctgggtgggcgcgggcgtgtttacccagggccgggcgtgtggctcgggatggcgccgctgtcagccgccggccgcctgggcctctgctggcctccagatgtgcgctggctccagccggccgggcccccaccccacgcacagaggggctttatcaaaagcggctgtgaggaggcccgggaggctgcctggctccagcctgctggctctgcgccccacccggcctgcagcagccagggagagcccaggcagcagctcccctccgcacggacggcaatccctcgtgcctggggggtgggggtggggcgggggtgacgatgacagaggggctggttggggggtggacacgggaaagacagggttcagggcggtggggtgggcagaggccgatcgatgcagggcttcctaggctgcctcgcttctggtacaggaggtcccctccactctagggttggatggggctggctggcgagggcgctcttctttatggtttctcggtaataataataacttatagtcccaaagtaaataaatagagaccaagactcctgcctgctggcctcaaccctgctgccctgagccgcttcctacagctagtcggagcgcatcccagaactccttcctgttgcagtttttaaaaaacggtttaaaatacaaacggttcgaggctggaggtgtgtgtggaagggcggcagggacctcattctgtgggcttgagaaggtctgggctccgcctgcacatcccctacttggagtctacccgcttaaggtgctaaagggaagtcattttcgcagctgtgtagtactccacactatgcatttcctcgctttctaggtctgtggtgatgggtgtctaagtggttccctgtggcacacactgtagactgcccacagcgtgctcactgtgtttgtgttccagggctggggaagtattttctgggcttccgtagtcgagtcttagcagtgtgacaggtgatatctttcctcctctgaaggcggttgtgcacttaccattcccaaagcctggcaccttcatcaccgggaagctgcagcctgggagtgggcgggagaatctttcttgtttgtttgttggaggcctttctgtagagctttggctggcctggaacacactctgtagcccagaggtctcaactcacagagatccactgtctctgcctccagaatgcttccgttaatgtgagccattaggcccagccacagaaacttgtttgtttttaggtttttgatttgttttgtttttgtttttgtttttttgagacagggtctcaccgtgtagttctgattgtcctggaatttgctctgtagaccaggttggcctcaatcttggaggtctgcttgtctctgcctcccgagtgctgggattagagtcgccagcagcagctgattagtgatttgtttttaataacctgcatggctgtctgttcatgtgggcccagctgcccacagaggcaggaagaggaggaggtgggggttgaacttggttctccaggaagggcagcaagtactcttaaccactgagccagctctccagccccggaaaccgttcttttgttaacaaataaacatttccaagtagggctgggggttgtggcataaacacctatggcctaacttgtttgcaaccctggatgccatcccggcacccacacccaaaatcccaagtctgtgaaaatgtaccttcctgttggtatggggagaaactctaggggtcttaggaagctgggtggtgggcacaggcgagaggggacacaggtggaaggagctggcccgtgtggaaagctggggtccagacacccacaggccagctcatgcttggtggcctgaccaggccagccgtgtctcctgtggggtctcagaggctgtaattaaaacctcattcagttctgtaattgttggttccgcccctgccagccccttcccggaactggctctccaaccccacctagcctggccacttaccattctgtccccagagcacacagtaggtgcttgtagctaattgagttgtgttttctcctaagtcaagtgccccaggagccccaggagtgactggacctggaaatagactctcccaggcttattaactaagggtctcaagacaagattccataatggccgatggtgacgcccaatgagagggaggacacagggacccagagaactgaccttgaggagatgggacagcagaagctggtgtggtgtggctgcagaccaagaatgctaggtgctatcagggattggagggagccttgaaggagcagcaccatgtccccaaacttcagcaccatgtccccaaacttcagattctggccctagcaccaagggaagaaacgtttgtctctatgtttgttcgttcgtttagctaaggtctcccgtagcccaggttagcctccctctgtggctgaggatggccctgaacttctggtcctcctgcttccacctgcagggttcggggttacagaagtgttgcttcaggatctccatgaggaagaggacaaaggctaaaacgagagcttctgcaggaagaatgaggcagggtgaggcactcaccctcactgggggctgctgggagccgtgacaaggctgggatgggaaccagctggtgacacactgggcattactgttagggcatgacttgagacgtcatggaaacaggccccacagacatcacaagctcagaagtgaagccagcacccactgacaacttccagagaagctgcagttagctagcgcttggtcccttcaggcgcagcccagagtcaggcaggtggagggaagttccccacctgtctgcccttagtccttcttgttgtggttctccaagtcagcaggaggtagttcaagaaagggcccaaacaaagcctggctgtgtcgtgttccccactgagcctcagtttccccttctacaggtgagggaaaggtcccctgtctttggcaaagctgtggcggggagtaggggctaacagactcagtaggtgctcactgagggatgagggcccagggcctgggtttcctggacacagacctgacctaaagcagggactgagcttgccaagttccggtctgcctcctgccgagtgaggcctgtccttgggcccctcggggctatggcacaagggccctcagagggactcagtctatgttttctgctgtgggaagatctggaatcatagctggctcaggctaggagcgttttgaaagtggttgaggttgggaaggggcgtgagagtccagtgtctctgtccctctggggaacttgtgggcagaaggggagagctgagcgggacagctgctaactctagggcaactgagttccatcagatttgggaggcagaattcccaagtcttggacaaatgccacaaaggtacttctgtggtatgaggtcagggagggaggggcttctggtccgagtgcagacactcagccaggactcctgtccccacttgatgtctggactgctgggtaggtagcattgcgcagggtgtttgacatctcagggcatcggcttcctcttctaccaagtcctcacaggccatcagaagcctcccctcaggcgtggggtgaagacggtggaggagtgggtgcttgggaggagctgatgcggcctctgagtttgctggatctgccctgtgagtcttcctacctccactaaccccatggagccctaagactcatctccttcggcctccaagatgggtccccatacgctgcctgactgtagttatggaaactagccaggagagatggaagcacccacgcctggggcgcgcagcaggtgggaggcagggccgagattcgaaccctgttctacttttccttctgttgttgggataaacgctgtgaccaaaagcaacatggggaggaagggtgtatttagcttccaggttacagagcatcctctggggacagccagggcaggagcctggagcagaagccaggaagatggtgctcttactgtccactctgcttgctcacacataacccttttagatgtgtttttgtcatgcttgctcattgtgtgtgtttgtgtgtgtgtgctcactcgtgagtggcgtgtgcatgagaatacacatatatgagaggacaacttgtggaacttgattctctccttccatcgtgtggtacccagaaaatagactaaggtccttaactgagttggctccctcagtggcctttccttccttccttccttccttccttccttccttctgtttgtttgggtctctttatgtatccctggctgtcctgaactttatatgcagatgaggctaagcctcaaaaatcacagagatcaagactgttgggatttcttttgtttgttttcaagtcagggtttctctgtttaatagccttggctgtcctggaagtcactttatggaccaggctggcatcaagctcacatagagatctgcctgccactgcctcccaagtgccgtgtttaaaggtgtgagctgctagactcagtcagtaaggttgtttctggtttttgagacagggtatccatacatagggctgactgtcctagaacttgctctgcagaccaggttgccttcaaatatacagagatttgtctgcttctgcatccagggtaatgggattaaaggtgtaggctaccatccaggcttcagcaatctttcttacacagcccaggttgatctgcctaggattggcaccacccacagtgggctgggccttcccacaccaattaacaattaagaaagtgcctcgaagacatggccacaggccaatctgatctgggtaattcttccgttgaggttccctcttcccaggtgatgctgcctttgtgtcaaggtgacagctgaggctgactgtgacagaccttgccctggctgctcatgcacacccttggtcttttaggatctgtctagagctcagctgaaaggaaccttgctcactagctgtgttggcttagaccacgctgagaccagatcctctgtgcatctgggggtgagggtggggctgcctggtcacctggggctcacagtgtccttggttcctgccctctgggtgctagagtcagccccacaggtgtgacaactgactgactttggagaggtctctctggtatgacagggctcactaaccctctaagccacctgcccctcacttcttgcagcaggaccccactatagcctgtgcccaagaagagcccggaagaggggaaacagccttgaaactgttaaagttccaggcccaaagctgtggaacacaggtggcttgttatgggaagtgagtgtctcacccagggcagtgtaccaggtgtctccctctgaccccagggcctatagaaagtcctggtttctgggtcaaggggtgttgagaaggaaggaaaggtggcagggaagaaggccagtagtccccattagcagccacagaacatggttcttggagggacccttgtggtgtgagggattctgggggcccatgacattcaggctacggccactcagagggcacttgcggtagatctgagtttgggacttgtcccagagcccatgcttatccatatcacagagcttatagatagagatgtgctgctccagggtcctctgaaggacagacagaccctgccaacttgtggagggagagctaaccccggctcgcaggcccatactcaaacgtgctgtctttgagcagatggcgcccctccctgggtatcagagtccttgctcaccccagcagcaaacagctggctaaggtttgctggactcaggccacagagggacaagcagtgacagggtgggaggccagccctgcagctacacagtcctggtgggtttgttgaaccaggctgcagagtaaggtacctggtacccaaatcatcagtagctctggccttggtctggggcaccagcgtagattccagccttgcttcagggacacggtcacttccttgtcccctgcctcctccttccttgctcccttgcagctatgcagacctcccagctacaacttcaagtctaccatgcccctgcctcgggggcttttgctctagtctcatctgtctgaaacctttctcccctcggatgctggcagattctccatctttgttcgagggctacctcgttggctttctccgactccagggaccctctgccccgtctgtgcgaacccattctctgccttaactcctctatataatttgttactgtcaatttcctgtctctgcaggggtcatggccatcctaggtcacctctgccagcatagtgtgccagtggtcagctttctgctacacctttggggctctggtagtaacacacacacacacacacacacatacacacactagttgagcagggtgaatgcagaagtgggcgcctcagcgtgttcctgtctaagtgaaggcattgtaatgtggctcactgtataaactgtagagtcctgtgctttctggatgcaaagggtgtgtcagaatgataagagtttgggttctggaaaagaatacagctaagtgggtagacctgggtggatgggtgggcgcaaccaggttcttggggctgggccaggagggaagccagggcttttgggcatcgggtctctgacctgaagcaatcactatgtcagaggggtcagttagggaggggggtgagagtgtggccagaaggggtcggggagtctcctggtctgaattatctgagagaaaaaataattatgttctgaggaagctgtgatataagcgagtgccagagagccacgggtgcactgggaggctggcggggaagaagtgacccctacctgaggagcaagtcatgggttcacagtgggccaggaatgctgggagtttactgagtaggagaggtggcccccaaactgtgagtggtgggtacagcagtcccagctccttctgtgggtgacgggccattgttctgtgtccactgagccagtgggaggttgcaggggttcccagactgtcacatgtccctttatctgttccttgggtacctgttcagtgcggcacactgggggcattagtgtgacactgtgacccgaacctttcaacccaggcctgtggtctcagcctcccccacctagaactgccaacagtgcctggtcagtcaccccttcaaaggcactgactatcctctccatcaccccttgatctccacagggcactctctggacacctctaaagccacactgtgtgcacctgcctcctagtcccccagcccactaccatcccaactcacagctcttgttcactgcacaggctctgacacgcagtgagcacacacaagatgcttgctgggtgagtgtgtcaggggaggaaagcctgctgggggcagctcggggctgggtctttaccggatggaaaggggactgtcagggctgtcgcctggggaagggctgatgggcaggtggggaaacagaaaggagtttcttctcagatactcgcctcaggtgcgggtgaggctgctcaggggtgggaacagggaacagggaaaataatgacagaaatgaccttcagtgcactgtccccacagaaacagacacctcacctcaccagctccacaaggggaaaggctggcctatgaggcctgtgttccagacacccatttttcctcttctgtttcgccccggggccctttaggcctttgcctgcagttggtggcctccagaggaccccacccctgagaccccacccctgcctctaccctcactgaaatctcaggagccaagggacagcacaagttaaggggtgggggactgcctttctctgctgttttctctgcgggacaccctggagctgggaactcctttcctgctcagtggccacatctgtccccacctgtccctgttttagtccagctggctgggaaccgatgtgggtgaggcagtagtctgtagcacaagggcgccctctgctgacttcaatgggtgctaaggcttgagctgaacctggaggcagtacttcatgcagacttgggccaaggtgtttgcagcggtgtgtgacccaggcacggagaggttagtgaacctgcctgaagtcatacagtagactctggccttgaggcctacaatggagaactggtgcattccctcctcacaccctcaacaatgcctaccccgcctctgcctcggttccactcagtcagtagcatttgtggagttaggctgggcctcgctgctcacagctgacgctcagtggggcaggaggggcaaacaataggaataaatatgtccctatcaggtgtgatagagcctgaatgtgtcagcttcagccacacgcccaccctgacgtgatttttttttttttttacacatttgagataggcttttctcgtcattgccacacctcagtcaactaagggtcactatcatggtcttgacggtaggtgacatcactcctccttactgaatgcctctggtaaccagaagcagtgccccaagataaagctagtcccagtggggatggtctggctgtgtctgcccaggatctgctgggaagctacaagagactctcgctcacaaaaagcataagtgtaaaccggaggtcacatgatcaggacacactaacgtgtgaaacgtcagaatgagactcactattgcatatggaatttaaaaagaaaaaaaaaaaaagatgatcctaaagtgacccccgccacacacctcttctgtttactgacacttctggtttctcatgactgacatttagcagcagctgtgatgacggggacaggtggatggtgtcctcatcagcttcctgcccagccgctcgggaacacaaatgccagcacccaggctcctgaggccatagcgcgttcctcaaagagctcctagaactgtggctccctaaaagccaaaggacacacattaaacatcgtgggaggacctggtaccccacagagactacaggcttggccactgttgcccatgtaccagtaggctaccggacttgtggtttctgggagacagcatgtaaaatttacttccacggaaaatgttggtgttgaatgagaccttcacacctgtgtgtgcacggtggcttctcagtgacagctggtggcagcagctacaagactggctctaggatctccatctcccaagccattgcagctgttggacatcaagggacccacgtggaccccacagtgcaaaagccagatcctgtgggctcatgctggggtcacgtgaggtcacaccctcaaaggaggatgtactgtctgcaagctctgctgagtgga

SEQ ID NO: 491 - DNA, 882 bp, Mus Musculus
ttatgcatggagtcataaagtaggtcacacacgttgcatgctctgctctgcgtctggcctttctcataggccgtgctttcaaggttcagccaggtggttcgctgcaaggatagcagaggtatcctggactacagagcaacaccctttctcgtgcctggaggaccagaagttcaaggtcatcattgactgcaccgtggtttggatgcctttttgagggcactctctggacacctctaaagccacactgtgtgcacctgcctcctagtcccccagcccactaccatcccaactcacagctcttgttcactgcacaggctctgacacgcagtgagcacacacaagatgcttgctggcagcagctgtgatgacggggacaggtggatggtgtcctcatcagcttcctgcccagccgctcgggaacacaaatgccagcacccaggctcctgaggccatagcgcgttcctcaaagagctcctagaactgtggctccctaaaagccaaaggacacacattaaacatcgtgggaggacctggtaccccacagagactacaggcttggccactgttgcccatgtaccagtaggctaccggacttgtggtttctgggagacagcatgtaaaatttacttccacggaaaatgttggtgttgaatgagaccttcacacctgtgtgtgcacggtggcttctcagtgacagctggtggcagcagctacaagactggctctaggatctccatctcccaagccattgcagctgttggacatcaagggacccacgtggaccccacagtgcaaaagccagatcctgtgggctcatgctggggtcacgtgaggtcacaccctcaaaggaggatgtactgtctgcaagctctgctgagtgga

SEQ ID NO: 492 - protein, 83 aa, Mus Musculus
QRYPGLQSNTLSRAWRTRSSRSSLTAPWFGCLFEGTLWTPLKPHCVHLPPSPPAHYHPNSQLLFTAQALTRSEHTQDACWQQL

SEQ ID NO: 493 - DNA, 42623 bp, Mus Musculus
  misc_feature (1)...(42623): n = A,T,C or G
agtgaaatgttttaagtccaattggttaagatgttgtctccgagggctccaactccccctccatcacccttcacccttcctttggaattaggtgctgtttgaatgactcctggcgttttgaaatctggtttacagaaaggtgagtcgagggtgagggtagatgggggttaatatgatgaattgatgtggtcctctgtcattggcacttacggttaaggtcccattagcatcatctctgtataggaatgatgtctgggaagatgctactcccactgtgtgtgcagatgaagcatcgccatggtaggaacccccggggtgagtgccagcacacaaaatggataacactggagatgcccaatggtcatcagagaagcgctgtagctgggcattcaagattctgagagtttacctggccccgcgaagaagaggaaggcttgattctcttaagcacccaggaaaattgtgtgttcaacattcaacagtgtccttgttaatgcctcgtatacattataagtataccctgtatctaaacagtcacaattctgtgtttgaatatcttaccaatctgtcactgaaatttgtagtatgatacatgaacataacataaaactcacaatatgttttttagtgtgttagtggcaagtaagtagctgggagccttaattcaaagaatggctaaagctcaatcaccgagtgagagagcttgaagtcacctccaaatcctatagcccaagcatgaagcttaatagagtgttccccaaatcctacaaatattctgaaatgtaaatgctgtagtcaatagtgcattttagacatcgtatgagtatttgtaaattgtcaataaatagtttttaaagttttgaccaatcacagtaggagaaagactattttctctatctttctaaagaaagtatttttaaaaatacatccctatcataagaaggtgatcaaagagtatgaaacaaaaatattttagaggtgtcagacagttaataaaatatgaagttatttttctggattttctgatgttcacggtttgttagtttttctttaaactaatgatccctcttgacttaatttctcattctgaatattcactttcttagcaagctttatgtctgtacttcaagtacagactgaaagggtgactccaaatttgaagagtacaagatcgaggagacaggaatgtcagcctggagtttggagacacagagggcttcatgcatgttggtttctgtttcctaagctcgaagcaatagcgaagggctggcaaatggttccgcagggtaaaggagtctgctcccgatcctgatgaactgagagcatcctcagaccatacatgatggtggaaggagcaaaaaacatgcctaagggccatcctctgactccacgtgtgcatcatggctcatgtgtgcccatactcaagcccatttgcacacatgcgagcacacgcacacacacatacacacacacacacacacacatgtatacacacacacataaagggaaagaggttttttttttcatttttttaattttattttttaagaaggtagatggttacaccgacagagtggctagagaagggacatttggaaggtgaagtgtcacatctgagtttgcacgacagaactgtgacacagctctgtgtgctgcctcagtagggaggcgggggactggattgtaggccctggatttctgcatggtttcaactgatccctcagcctggctatggaactccctgcaccctgtgtgaatcctgcaggcgagcaccacagggtcacatgcgtggggtctcaggaaagtggagtgggagagagtgggggagaattactggttaatggcttgcaagttctctgtttctgtcccttcttcattctgctccaccctgcatgttttaaaggctaaagcgacatctttctgcgtctctagcctctacgacgctctgctctgtgatgtatggccttggtcttcgtgtccatgctaagtgcagagccagtttccaggcatcagcctggtcagcgtcctgagccaggttggacataaaatgtttgtttctgccatcatagaacattccatagtctttgtgtgggggacaatgagagtgtgtgcatatgtataaatattgtaatgtgtgtgggtatatacccacatgtgcacatgtaggtgtagaggaaagcttcacggttgaccctggttcaaggccattctgagcaacttaatggtatcctgccttaaagtaatttttgtaatgggaagggttaacttaatggtggaggcccctgggtcatctgtgtatgcacacgtgtgtggactctctgcatggtgcttcttgcatggggttgtcctgcatgggtgccctaagtagttcacggtgggttgggtcatctaggagcaactggtttcactgactgttcatggagggaaactgagacaggacctccccaccctcgtcacagtggaggacgatggggcatttcctcctttcatgagccttaggcaacacataggaaaaagtctctcaccaatggacaccttggctgaagaagttcaagaagtgaaccaaagggccagtaacattttcaagggaccttccggaaggggaaggtcaccttattcctttcttgtgtcccatgctcctctgccatggaacaagcatcagtagagctgcggtggagaccattggctttttctcaggtttgcatcctggcccatgctcagtgagtctacaccattaggaaatcatttcccttgagcatgttttagcttcccagcctttacaatgagaggactttttacttgttgtgttcttgagtttagcatgggacaatatttaaagagagcatagaaaacgtccatgaagtcttagggaagcgggattccttattcattttaaacctatagtcttccaattcactcatttgtatgtgtttcctgagttcttaccataactaaatatcttctgtaatcccacttctaatcagactcattattttattgaacataaagtgctttaatctggtctatgaatggtataaaagatttattatacaaatgaatttttcctaacatctatcgctctgtaaataacatttaaaaattgtttgaagctgggtatggtggcccgttcctctaatctcagcaccaggtaggctgaagcaggaggattcagagctcaagtccacattttagcaaaaaaagactgagttgtttcagtgggcataccttcaaagcaagctagcatgtaaacaaacaataagtaagtaaaaagactagtttctgtatttcttcaagtcaccataagtcacaccagtggcatgggcaccatagtttaagaaatggtacgaaaacagctgtttttatatttactttccctgattctactatccactcacaaacttactgatccctctagatattcaatggccaagtcaccactgaatgaaattgtttattaagcatctagggcgctcaggttctgtgccggatgacgaagggatgtgaataccagccggctaagttctcgccctggggagcccaaggagggagccagccacatacacaggcaattaatactagtttacaaagacctgagagaccacagactagggcccagggtgccagagaaagagggcaggctgcctgtgcctggggagtcagtgagatccctgtcaggagattctcagaggacttacactcagccctccctctgggtggctcatgatgaaatcatggtcggttgttgccaatgagtgtgaacatcaatgagagagttccttgttgagtgagatgatagagggaggcggctcacgaggaagaattctggccaaggtgcacccatcctccttttgacacacacacctgttgaatatgttctgtgtgcttggcctggagaagttggactcagccatcctgaagaatgaattctattgggaatctcagatgccgtgatagatacaaccccacaagcaataactgactaagaactgtggcaattgctctgcagatatataatgtcatagaaacacgaaattctaagtagactagtgtgtttaattttaatgggaagaacaaaagtgtcaaataaactgcacccctcagagtttccagataaaaagccaaaaatcaaggaatatacatgggctggttcatgccccctgcccctgcacatgtgtagcagaagactgtgttgtatggcctcagttgggaaagaatgtgcttaattctgtggaaacttgattccccagggaagaagaatatttgtgggggtgaagtagaggtaagtgggcgggtaggggaacaccttcttagaggtgaggggataggatgaagaacttagggataggactgggaagtgggccaacttttggaataataaattttatttattaaataaataaaataatttaataaaaagcattcattctttgagaatttcctacagtgtgttttgaccatattcacttgatctcttcaccaacttctcccaaagaccctcccccacacctctgtgcctttttctttcccctttcttttaaaaaataaacagccattgactccgatttgtgctggccatatagctgagtgtgggttcgtgcactagagcatggttgatatctcaggagatagattcttaaatgaaactgagtttctttttcccataagccaccaactgtctgtttctccttagctatgggtgggggcctaataaatccatccactcctccaggtgaatgtgttgagcagcttggttttgtgtaggcaagcaactacttccagctcatgaatgacagccctttatttcagaagatactgttttactttggtcctctctgacctctggccctcacaatccaaaaaatgaaagttaatggaggagccaaaagaagagaaagaaatgtctagggtgttgggttgggagtgacattgtgagtaaagctttgttggaggtgtagacaccttagcatggtgaaaagcataaaatggcctagatgaatagccttgtaggtcgcagcctccctctctgatggattagtaaaagattgtgttggttagtcctgaatgccaatttgactgaattgggaaacatccgggaaatatatgaagtatgcttagaagtagggagatatatgaagtacacttagaagtgtattatctgagaatcatgccagagaagattgactaaggagaggcaccaacctttggtatgggtagcatcatcacctaggctccagacccagatggaatagaaggaaaaggggtacagtcaatgagtgagaccacagacacattctctctctctctctctctctctctctctcatctccatgatatgttttgttctttctcctgcatatctttcccaccgcttggactgattccccagaaattgtaggtcaatataaatctctcctttctcaagctttttgttctcaggcatttgtcacagtgatggagaaatgtctaagtatggagatgaaacacaagatcaaggacatatgatgttggggatcacaccagatatgggaagaaagcagtccccaatctgtattctaagtacactatagagaaatgtgaagattttaagccgagaaatttcccagctaaattttcctttgggagactccactcccagttcagcatggggaatggattggcaagaacatgaactcaagtcaagggtatgaagggtgcaaaggaaggttgatgggggataagaagcagaggggagaggcagactggtgtctctaaagaatcaagtgcatgctgccctctgagaccaacagagtgagggcaccatggaaaccagagctatggtggccgtccgagctccctttgcatctgtgctgtgggaggagcttcactttcctctcaaaactctgtacttttgtattctaaatagggagccaaccactgagtggctgtattgcctgagccagaagcacatggaaattctatcggagagtaggtgctccgtcgagtggagtccagacacagggtgaggtgctttgtctgcgtgctccaggaaaacactcttcccatcaactttacaatgtcttctagagaggcaaccttactgtaaaagcactcacacatgctgctcctactcataagtggcattatccacagatgtgtcaaagccataaaataggagatttggaggccatcacagctgcaaatgattaatattttcattccaagatgccaaggagctaccaaggtgcagttaatggttacatgcctgggtcttgtactgtggatttcttcccactgtgtagccgaggagactagaagtctccactgggagcacgaactggacctcaggcggttcttcctgtctctatgaactgcctcctccttctgacggacgaaaggaacaaacaacattctcacagccagctgcagtgatgggcttctgcagatggagagggggaggggaaatttacaaggatggcactgcactggccactgtctgggctcagagaatttcttctctcttcatttctgtttggaaatgcatcacacttgcctgcaaactccaccagctttcaaagtggctttttactgctactaacatttaaacttctcaacatatcctccctgttatgatgtagggtgtattcctatgcatattggtttttcctcttcctcctcctcctcctcttcctggccctcttccttctccttctagtcctcccccttctcctcttggtcctccccctcctcctcctggtcctcctcctctttctcttcctccccctcctcctggccctccttctcttgttctgctttgatgtctattttgaggatatttgttgatctatgatctaaaactcccttttagaataccccacatttaaagataagaaaatggagcaatcaacagaagacaaaggccaggagctgagccttcatctcttagtgaatctgttattcagaaagctccatgttctcctgaaatctccccaaatctctctattcatgtggttttgctaggatccatctctgttgaaaaatctagtttaagctgcctggcagtctgagaaaaggaagatctattaatttaatcatttgtatgaatcacgtctaaatgatctcagcagagaaaatgtgtaagccatttaaatcccatcactacatattatataataattactgctaattccagtttggatgggccacaatttggctttccatcccccctgcttctgaatacagagaattgcgatgacctcaccgaatttagcctctccagcctttaggctttctttggccttcctcattacggacttaatagccacaatccgcttcgagggtccagtcaactcggagtctgttcccttctggtaattagcattcattttgtgatttcggagttcaagctctccacagaatagagcccggtgttaatcactactgtcttcctccctttgactctgatctgtcactaccacgcggcttgtcccatacctaatatttttgcccttaccagccaactggcacctccgcatcccacagagtcagaattggcaacttttgacagatctgtaatcatgccgtactcatcaacggcgtgcccgttagtcatttcatttccacattctaacagttaatatgccttaatttctctcactttgtgaatatttaattcctcccttttcaacatcatttttaggttgtgtgaatcattttcaaagcctttgctcttctctccgcactaccatctgcatattttatgaaatggcgcggttaagtctccgagggctcttgagaaagatggagctggcaacctgctcattagctgtatacctgggtctgtgtgagtcccagataatggccagctcccatttggattcgaattaggattcgctgacaaataacagtcaggatatctcctggggatgtctgctcgcttgtcggtgccttctccttctctcagagagttctagaaaaccggttggtgtgggggtcgggggagagctgccttaagtgtctcacatcctggtgccagaagcagtctctagcttttgaagtggagactcccaagctttagcacattagcacctggaaaggagacaaaattccccagaaaggacgcgtgctgaaggtcgggtgatttggccttcagcttttacaagtgccagaagttggttttctgtagagaccagtgaccagctgtcccaacctggcgaagactagtgtttcttatggtaagggacttagcgtcaggaaggtctaagatgatgcggtcaccacgctgtggctcacttaggatgatacactcaccatgttgggggtcacttaggagccttgcaaatgctcccaacctccaaggcagatggagaagcctttggactgtgaaatgagccaagcagctttcttgtctttactgcaaaggctttgagtagaggccatagccaaggtgcccacaagcagaatgtgctgagtgccgtagctgcattcatgaattaccgtctgcatgtgaaatccagagatgtcgtatgaaatcacttctaaaacacagaagacacggctccaccagatctctgttctttgaggaatggagggagcagttggagccacacagcacctgtagatgtggcacctgctggacctcctctttttctctagctagaactagcttgtatcactttgtacttctgcatttaatgttaagattgctgggcccatggtgcacctaccatgcacctgctccattgtctgccattgggcaaggtaagcaagcacactgggtcactactttcttatggtgctgtggtttaaatatgaaataccttacccaggatcatgtgcacaaggcttgattggcagactgggtcaccactgcgaggtgaccggactcttaaaaggttggctctaatggatgtcaacagtcattggaagagatttggaaccttgttctcttcccatccatttctttgcaaaccccaagataagcagctttgtcgcactgtggatgcccctcagaacacagtgacaatgggctgagatttctgagcatgagaaaataaatcttcccattgtatcaggttttttttttgtctcagtcattttgttgcagccgttgaaagctcacacaccaaatagataaaacaatgctcctataaatgttataataaatacagaattgagtaacattgagaaaatgcatatgaataaattagtataggcttggtattcaaaaattgtccattaagcatgggttttacattgttagtggtggtgttagttttacagtaaaacaaactaaaacttagaaatgcccaatgggtgtcttagcatataagtcctaaccacacaaataagaagaatgaaagaggattgctattagaagtttgaaaccatcatggagagttgggagatggctcaactgtcatggagagttggaagatggctcaactgtcatggagagttggaagatggctcaactgtcatggagagttggaagatggctcaactgtcatggagagttgggagatggctcaactgcaatcttactttctctgcaaacataaggacctgcgtttgaatctcagaaccgcagtcaaaagattcgtgagcaatgcctgtcaccccggcactgtgtgggctctgcttgggaaagattaatcctgagagctctccaatcagtgactgtgcaagtcagtgggagactctgcctcaaggcaacagagaggagagcgattagagggagacactcagtgcactactacacagtcatgcattcacaacacacacactacacagtcatgcattcacaacacacacacacacacacacacacacacacacacacacacacacacaccacagaggctataatgtctttggaaagcaataccaaccatgcttgtaaaacaatctcaacaattccacttacacaattaatgatgcccttgaccctgctgcagaacatagcataccatgattgatggtcagtcatcctcccgggttcctctctgcaccagtaactcccctgctgcctttcagcatccagtaaggctatacctttcatgcagactgaactttggggatagactctgtatcctaaacattttctccatcagaaatggtcatatcccgtagtcacctcgtgtcagcagggattttcctggagggcagcaatgatgtaacactaataccctggatttacacaccagtctccctcccaatagccccagggtactaccttttatttagttttaaatgtttttccactctcaatggagtctgtggtgacactgcctgcccatagctgtgctttggagtgacttggaagctctatggttggatgacatatattttgagaaccaggcactgtggcatatgcctgtaagttcagttctcaagacgctgagacaggatgccatcttggactatatagagtgttctaggccagtctgagctggaaagcctgtatcaaacaaaacaaaacaaaaaacaaaacaagtgttgttgattctaactcatctgcatctagcttttagtctgtggttggtctcctgggttgtgcaaattgcccagttttgaagagtgtaatgaagctgtctacgatgtagttagaagggtacaggatccaccaggaatgcaggcacaaaagcgccaataatggccttttaaacagctctaccactcaagaggcaagaagagggtgaagagggctgggagagatgtcagttagtaaagtggttgccgttcaagtctcagttcccaagttcagttccaaacatccacataaaaagccatgtgggtgagggacctataatctcgatgccctctccgtgttgaacaaggagatcatcaaatattacagagctctggggatcgttaagcgcaggctgagcaagaggaagaacccactggcctgtagattactctcagtatcgtaattctgtattttatttttattcatctccccaccaccacctttcagtttaacttctgagaaattaaaacacatcttcaacgcctacctcttaggcttcctggaagcagtgctgacccaacacttcaatatcacatagatgctagatgctgggatttatggttgtagacactgggcagctcttgtctggggttgggacatctagttggggtggttggggtctcttgattctctcaaaaggagtccacagaggcttcagctccaccctggtcttacccccatctcctttatttactactattggatgcaactcttctatgagttctcaacttgggcctcctgggctcataaaagcttcatggagagggagagggaagcctggaatgccacggcacagtccttagggacttctcagcaaccaatcaatgcatcccaatgttgacactcccgagtgaaaagaatgttgatggcccatccatgagtgctgaccgcagtcatggatggagaggaaacagtaaaagatgagaaggggctgttaggggcgtggcaggcaggtgaggagctgctggaatggaggaaagagctggacaggatatgttaggaagtgccattcagggccagttactaactgtgccctgattacaggactacccaggtggcagtggggctcccagaagtcagtctgaggagctcacctcttaaaacacactccaacttcatagttgagctcagggaaagttatgtttagccccctcaacaaaagagttttatggatgaagatttttccacattcccaagattccaaccaacctcaggtctgaattaactcagatatgctgttttgtttacatagaatatccctaacagatgtgtgaggacattagggtcccctgggaatgtgttttcgaaagagaatccttcttattccttcttcaggtgggtttttttgttgtgtgctggtgacttgtggaaaatggaccacctctggcttagcgatcaggtctgaacatttcagatgatgataaactctatttcatagcatttatcattccagacataaaagtaatatatgtcaatgtcctttgaaaacttctctgagacaccatatacatgaattataataacaaacatttttagttttacaaaacagatcatccaacctgactaataaaaggtgacacaggatctaaggagatgaccccgtacttgttgtacaagcacgaagacctgatttcagaccccctagttaaaaaagggaatggttataggcacctgtaacactagcactgtctggggcagaaacaggagggtctaccgggctggctgagtgccagccttgttccaagttcagtgagagaacctgtctcaaaggaacaataaggagagtgatcaacgaggaagacagcaacattctttctctgtcctctacacatgcatgtaagagtgtattcatccacacaaagagtgagaagataccacacatacatatatgcatgcctgtgtgtgcatgcacgcacatgtgcgcgtgtgcacacacacacacacacaatgggaagagagagagagaaagagagagagagagagagagagagagagagagagagagagagagagagagagagagagagagagaatcctgcagagagtgttctgaatgccatctctgagcagaatcgtcatctcaaggctcttaaatccttcaaataaggaaggtcccagccctctgctgcacagcaatcccacaatgccctgagccacactgtctaaagagtcctcttaatttcaccccagagctcatctgctctgagtgcagtcctgatatctttgagaggtggcagccctcccccaatcttagtcaattaaacaagctattgtttctgattaagatatcacatcccagagaataacagcaattaaagctggaacagggaccccatgggtcgcgcagtccacttccccgccagctctcaaggaggttttacattaggctgtagttttatgtggttttcctgatttggtttttaaaatcccagtacctgtcagtgctaattacattctggctggacatctccaccatgacttgatcaacttagcacggctgattttcacagggctgacacagagcgactgctgcttggtcatcacagaacactggacagttgccgggcatgcttctggaggaaggaaagctgtgcggtgatttggtctcctggggaattagaggggtttgttttctgtcggaaatgcttttgtcagttactgtgtttcaaaatgctggtaacatagtaggtcttttgttttcctttggctaacttagaaaagaaaagaaaagaaaagaaaagaaaagaaaagaaaagaaaagaaaagaaaagaaaagaaaagaaagaaaagtaggtgtctcctatgcctaagtgttacttcgctggtaaccaattcccccactgcacgggaggctggagcagtctgtaggagaaacaaatggtccctgagggtttactgcaggatagagctgatagtttaccatgatgcactgctgggtcctgctgttcacttccctccattctcaaggctggagtgtatgtgacaaataaagaaacagaggccactccaaagtcaccatgccagagtcacagtggtaaacagtctaattttaacaaatattttatggatcaaatttgacctatttaatatcttaaaataatatttattaaattaaggaaccgatatgttgttaattttatctaggaatatttaatattacataaatataattattttctgtgtaacaattttacaagtcataaatagtcagtggattgaagttattaaataagatgttcagcatgctaataaaataaaagtttattttaaaactaaactgctataaatattaataatctgaaacattttggttttgttatttccttttaaatggtgttggctccattttggcccattctttttaaaatacctgggacctctttccctttgtaggccgtggtccaattccacactgatgcccctgttactgtgtttggagcggagtctgtgcagactttctcactaccacggggctcctcacatctgaggaaaacaaaaactgttatcgtgtttgatttcttaataatatctcgagtaaatctgcctcagagtgatttaggaaatatgttttatacaatattactgtcatattcttttacaattaaaacatattatgcatactggaacaaaataataatgacctctactctctgtctttagcctcagccaacaggtttccaggaactcatttttgtatctattttgagagagatactatagtatttcaagcaatatttccctctagcagagagagatgatagacacattttgttctgagttgtgtgtgtgtgtgtctgtgtgtttgtatgtgtgtgtatgtgtgtgtgtgctttaagcatggagtgatattaatggacaaatgtaatatgcaccacgcctcacatcgtctcaggccctctttatgtatattaatttacttgacatagctgagtaccctgtgagacagtcctaggcatgatgttcatcctcaaacaaggccacaggaagttcggagcttaaattagttgctggagacttgaatgaggttgagacttacatctcagacacattctgaaatattagaaataacaatgaacactgatgcttttaacatgtatgtgatagctcacctcttatgagccagtctcctaacctggacatttggaccatttctcctccctacccagactttaaacactgcgacagtgaccgtgcttgactgcacacactgctttttccaattctttgaaacagaacaacttggttcatttatactttcagaactagaaaagcaaacaaaccaaccaaccatgctcataggagttgcttgaattttcctcccattccagaaactcttctttaaatccttgagtggtgcttgggtctcccaaattctccagctgaatttgggggctcctgagcacagtacctattctcttgtatggagattagttacaacacactgataaattctcactctgtaggctcctgggtctgagaacagagggattaagacacattctatgcccttctgcagcactgtgcacaaagcatgacgttccttcagcacgcagaggggttagaccttcagccttactccttgaacttactccttggtggttaaactgatggtttcacccccgaggaagatttaattcctcgataagccttaatcgtgccctgtgacatttttagttgtagtggtggagtggtggacctagtgctatgggggccaaaaggtggaggctaacttcctcacgatgtacacagtatctctgccttttcaacaaaagattacccagtgcaagatgccagtaggttcagggctgagaaaagctccaagtcaattatcacactctttgataccgttagtagtctgcccatgggcaaacacagacacacctgccttcggcttcactaaggttcccacgaatgctctttttttactgcattaggctgtaatttcttgggttcacagctatttccattaagaaagactctgctgcatagaggttagtaccgctcctgcagaggatgggggcgtggctgatcacaaccaccagaactccagttgcagaggatccatccggggccctcgtctgacctcagtgggaatcagggacacacataacacattacataatacacacacacatacatacacatacacatacatacatacatacaggcaaaatgcttatggacataaaatacaatgtataaatctgaaagagtaaagtatctagaaaataagacaacaaaatgaatgccataagaagaactcaaactagtgacgatttcagaagagactggactaggagctggggatgtagcccaactggtagaggggtttccacaaaagcacagataccctagattaatgccaagaacacagttaaaagaagctgtgttgctgaaaacgtttagccccagcttgggaggaggggtagggagtcagacaggcagatccctgggcctcactccctagctagtcaagcctaaatggtgacccttatgctaaagggagatcttgcttcaaaacacaaggtggagggctcctggtgaatgatgcctgagactggtctctggtctctacatgcacgtgcgtgggcacacgcacacacacacacatacacgccacgcacgcacacacacgcacgcacgcacgcacgcatgcacacacgcacgcatgcacgcacacacgcacgcacgcacgcacgcacacactcacgcacacacgcacacacacgcacactcacgcacgcacgcacgcacacactcacgcacacgcacacgcacacgcacgcacgcacacacacaggcacgtacgcatacacacacgcacgcacgcacacacacacacaagcacacgcacacacacacacacgcacacacgcacgcacacacgcacacacgcacgcacgcgcgcgcgcgcacacacacacacacacacacacacacacacacacacacacacacacgatacatgggaagttctttgaagttcatccttttccatcactctcctttctgccacatgtcaatcaccaggcgctttctgtagtctcttcaggatgacttctctccaggcctctgctgtcttctgtctgtaaccttccttgctggcctgcttcttacctgttggttctcaggcatggctgcaatgctcttcactcaggtcacacctcagaccaatggaattggaaaccctggagtgaaggtgtggctaccatgttcccaccttgatgagaatggactgaacctctgaacctgtaagccacccccattaaatgttgtccttatgagagttgtcttggtcacggtgtctgttcacagcagtaaagccctagctaagaccttctccatgttaagaattgccccacttaaagcctacagcctttggtgagcatgagggacctggaggaagtagtgtattttaaacttagaattgggtacctttccttggcagagttttccctaatttttctaacctgcatcattggtctttgctgctcagacccccttgcttgctgttgattggtcatgctcgcctatcgctccttccctgtgtgctgggattcattttcttccacctttaatcaacacagactttacatttcatggcctggctcacatctcctttccaaatccagcgttcctttttctgtgtgtcaccccagatcccaatgcggacagaatcttgttgcatcaaagcagacctattttttttcccctacaaataattttttttttttttaaaaaacccaaggctttccactggtggctgaaaatttttggttttatccttctaattactcccaggttaaatctcagtaatatttaggttagcattcacccttccctggcttggtgacccccaggcagtctgagtatgatgagatggtcatgcaagagcaagagagaaatttctagagctcatgccatccatgggtcctatgcaccgaccttcactgaggggaggtggttccccccagggcttgaaggtcatggttttcaatctccttccatgtatgacctctctatacactcaacatgtttcttatgcctctgtgtaaattcatgtgctttgggaatgtgagaacactgtcagattgggacaacaagaagtctgtgtcactgcctgtcctttagggatcttatgtaggggtgaccttcagtgcttaccagcagtactccagctccttcccgggcaccatcttgctgcggtgagtgagttatctgtcctcctgatggggactctcctgagcttacttggtggcatctctcccacccggcttctctcacccaaggttgctccactaaaggggcaaagagtaaagctgtttttagacagttgcccaatgctttgattttgttcaaaacgtttttcccattaatttgaatgactgaaaaatctccttcttggataattatcccccctcttccttccttcctttcttccttccttcctttcttcctttcttccttccttccttccttcctttctttctttctttctttctttctttctttctttctttctttctctttcttcctttctttctttttcttccttcctttctttttcttccttcccttccttcctccctctctctctctctctctctctctctctctttctttctttctttctttctttctttctttctcccttccttctttcttttcttccttcctctctttctttctttcttcctctctttctttctttctttctttctttctctttttctctctctttctctcctcnnnnnnnnnnnnnnnnnnnnnnnnnnnnnnnnnnnnnnnnnnnnnnnnnnnnnnnnnnnnnnnnnnnnnnnnnnnnnnnnnnnnnnnnnnnnnnnnnnnnnnnnnnnnnnnnnnnnnnnnnnnnnnnnnnnnnnnnnnnnnnnnnnnnnnnnnnnnnnnnnnnnnnnnnnnnnnnnnnnnnnnnnnnnnnnnnnnnnnnnnnnnnnnnnnnnnnnnnnnnnnnnnnnnnnnnnnnnnnnnnnnnnnnnnnnnnnnnnnnnnnnnnnnnnnnnnnnnnnnnnnnnnnnnnnnnnnnnnnnnnnnnnnnnnnnnnnnnnnnnnnnnnnnnnnnnnnnnnnnnnnnnnnnnnnnnnnnnnnnnnnnnnnnnnnnnnnnnnnnnnnnnnnnnnnnnnnnnnnnnnnnnnnnnnnnnnnnnnnnnnnnnnnnnnnnnnnnnnnnnnnnnnnnnnnnnnnnnnnnnnnnnnnnnnnnnnnnnnnnnnnnnnnnnnnnnnnnnnnnnnnnttgtgtctagcagaagggggggggcgggcaacttacagcgcgatgaagttagcagtcaccggctctgctgtttgccctcggtgctttctacttttgggggcatgtgaccagggtctctggcttatcttctgaggaaggacccccttggacataaataagtaaatgctaagtaggaaatgatatttgagtggagtgagaaagaggcttgctctgtcagggaatataagaaaattcaggaagaggcagggccaggactgcagcttgttcgaaatgcaacgtgaacatttggcttgaggactgagaaagagcgagctggggagagaagcgtctctgtggcgagctggtgagtggaccggaagcaggccaggcattttcatgtttattaaataaatctagcaataaatgggcttggaggaaagaggagactttgacttctgctctgagttaagccccacagttgcctagaatctgtggctgtggactactgactcattccatcctgcatgctgcaatcacaaaccagaggcaaggctggaggaaggagagggaaggtatccagctgctctggtgggaaacccagatgaccacatctcctctgcagttgaaccctcacagatctccttcccttgaccatttctttacccatcagtgccttccagaagagccaatgcttgctggggctggggtcgggcattcccatagactgtgtctagtaccagagcacagccagaggtctgctgaaggacagtgctgactggaaacctggccaggaggactttgacaagcccttaatctcatcttatcggggagcatttcttcaggatggtcccagggatgctttcccttccctgatgcagaaaaaagaaagcacaactgacgtaactcagggctcacaggtaccaagcaggaaggtcaacccaggaccactgctctgagtcactaagccagaggtcttcgaagagtcgtgggttgtgcacagtgggtttggctggtggcagccatccaattggaacgaggatgctgccctcccccccacccccgttcttccatcgctctaataaaagtcagatgggggaactgatcagattgctctcttggcccggaccccctttaaatcaaacagaggtctattttggctctctatgttaagcagacccagagacctgacattttgtgtttatttgaaatgataagcttaatcacgagcaaaatgttaagagatgatagaaatggccacagtaaggtcacatcatgtccctgccaaacacaatacagcctctcgcccccgccaggttgccaagccctgccacagggggcccggaggcgctggcaaatggggaccagagtctgtctatgtgataattagtccatggtactcagcagagcctgccaaaactgccatatggtagttttatgacctggactgctgttatctctagagaaagctaacatcgtaatctcatttcctcgttatctgtgatgagaacttgaaccttccacagggcaaacaggccagagggtgaggaagccaaggagtccagagcccgaagacaacactgctgaactgaaagaggtatgtgttactgctaacagtggttaccctcgaaggtgtcctaggggcttctctgaaacctgatgtgtgctgtatatgaactctattaccagactagaacccctgacatgggaaggcaagcagggttgacctccagaaatgtcacagccaggatcctatttctcttatcgttgtatactttacaaacagatagggcaagctatttttttagatttatttattttattgtttttatttatgtgtaggtatgcatgtctctgtgtatatatgcacacaacacacagtgaatgtctgtggaggcccaggggcatcagagaccttcctgtttgaatcacaggtgtttgcagaccacctgatgtgagacctgggggtgacatttcagttctctagaagaatagactatgctctttatagcttgaccatccctccaggccctggcccagaatcttctatcaaaaatttctagaggtatgatagacaatgagttccccaaagcattttattgagtgggtcagcttcaagataatccacatcattatcactaagaaagaactccaaaatggaggagaaaggctgtgtgtgatccctacgtccatgtaccgtgtctttgcatgtttcatctcctgcttaatgaggggtgctgtagaagaggcagctgccaaggctggaatggctgtgggctcccaaatgtgagacagaacccaaccatctcagacgctctcggagttaatttctctcgtgagatttggggtagaggctgcccactgctctgttcctcacattgactcttccctttcttcttctttcaggataacgaggaggccagctaaaggtaacacttgatagccatgtgttggtaagacgcctgtgattatcggagtgttgagaaagagaaacgcagaggtggagccatctcttctgttgactcccaaatgtctactggcaggatccagggaaatcctcccccatgccattgtttgtgttcttacttacatatatctgtattttatttgtagttgattcaagttcttatgtcaaatgagagaagtaagctatttcagtttaagatcatcttctctatcttgatgtatttttgagttccaagaggctgcccagaagccagatgtggggtctttgttataatattctgtctattgcagtcttctgtaatggagtattcaatgttcccacggaattcctgcatttttgtctctcactctctgtgtgtataaaggttatctgttaatataatctgtctacatggatctacatttgtatgcacacattcttaacattttatatcaccatcacaggatacacatgtatcctttgaatttgagttcttatttctcataatctttatatatatatatatatgcttaaatcaaggtcaaactgttacgcaacgcacaagacatattttaaaggcatgatgtcacaagctttgattcccatgcatacctggtgtgacccatgcttagtcaagtagatggccatcagctgctgggtgacaaagagtgttgtccaggaagcctcacaaacacgcacatgctggccagttcacgaggacagagtcctgtcccggtgccaagagatgggcttggcacagggacaaggtcagagtgtccacattcacaggagttcccaggcagagccacagccttcccctcatccatcttgcgcatggtcactcttatcagttgatcatgtcaggctgtttgctacagagttagcctgattgtgtgaaccagatcacatgaccttccataaatcactctcatcatccctcgctattttgaaagccgatgaaacggctggctctcggctccttgctttgtatgcaaatgatgaattatagatagaaggaaggggaaggttgtctctggcttgctggcttgcagggagcggatgagaggaaccttgctgctgctctcaagtatttattgtgacattgctgagaaaaatttaaaccccaaagactccagttctcttgggacattgttagccttctgcaggaattattaaaatgtacagaactgtagaagctgtgctttataataattaatcagggtctgttgattaataaagctcatattttagtctcgatgattcaggggatcatccgaaggacggttttcttgtcactttgattaagaaacccaactttgtggtggagaggagaggagagacggttgtgcttcctccagccccccataaaataaatattgaatgagaatattaactccttaaccttggcaacaatttgtaattttcataagggggaaaaactcgcgtattcagcaaataaatcgctgtggggatttcaggaaaacaaattggagagaatgaagaatgctgccatatgaattctgtcacttttatgggccagagtgattaatttgtttgtttgggtccctcaattaaggccacaaacagagtgaggtgtcgggagcaagttagcagtatcgtctggcacggagcagtcaactgccgtggagaagcagaggcttgagtggctgcccataaccttgagccttagcaccacaccaggcccaccctacctggggttagcgtctgatgtccctctattaatagttctaagcttgtttttactgataacccttttcactgcccagctacgctggagaagcctgggttagagttagcagggccatcccgatattttcctgggctatctaattattttgaactcaatttgatgagatgtagaaaagaaataaacccaggagccatttaccttgctagagagatggctccctttgtctgtgaaaatcaaaatcaaaatcaaaataataatgaagaagaaggagaagaagaagaagaagaagaagaagaagaagaagaagaagaggaagaggaagaggaagaggaagaggaagaggaagaggaagaggaagaaagaggaagaagaggaagaagaggaagaagaggaagaagaagaggaggaagaagaggaagaagaggaagaagaggaagaagaggaagaannnnnnnnnnnnnnnnnnnnnnnnnnnnnnnnaagaagaagaagaagaagaagaagaagaagaagaagaagaagaagaagaaggaagaagaagaagaagaagaagaagaagaagaagaagaagaagaaagggaaaaaaagccaaagcattagaggccagcaccaaaacccttgtgtttttaattttgcagtcacctggggcccggagatgtattcctgcccctctttgaccttccacactgctacccagaggataatgtggaaatatttgccagtgtatatatcaagcttactgttttccaggccagctcagcttaacacttactgcccggggaccctggataatccgtgctttgtttacaagttttatttgttcttgcaggcccccaggccatctgtctatagggactgcagatttaaggctcatttcaattttactctaacattgactttttttgtatcggtgtgttagtggcatgctaagaagagagagagagggaaagagagagagagagagagagagagagagagagagagagagagagagagagagagagagagagagagagagagagagaaaaaaaaaaagagagagagagagagagagagagagagagagagagagagagagagagagagagagagagagagagagagagagaacgtattagtgtgttagtggcatgctaaggagaaaggcaactgaaacagatatgtttcatatttctctcagaagaaaatgaacaaaggacagagaaaatgacctttcaagtgagtgggaagatctagaattttctgcagttccttgttgtcatatctacctggcattgcccctttccagaaagatggcctcaaccaacttccgttatatctttaagtctgacttctggtttgaaacgtaaggctttcgtcaagctctgccccttaggctcaatgttgtgatgaaaggaatcacatataaaagcgttggtcctaatgcttggcacagattcaagtatttaaaaatacagggaaatgctgatggtggtgaaggggccatggtgatacagaaggaaagaagatagaaaggacagaaagacaagaggccaacaagggagttagcatccagggcaacaggcagagtatcaagaatagaggcaggaaattggctctgagtctcaggaggcagaagaaagtgatgggtgaaacatgtctctagatggaccacgatagagccagaagagggccagacctgcacctctggcttcttcttttcagttacgcatcattcaggtgaacacagtcttcgtcaaatgctggaagagaacaccgttgaggagcttgtgaagagcgaggaacggacatagtcaggatgtcaagacagctgacagaagtaccaaacagcaggcaggggagggcctctgatgtcactctcatagatgagccggatctatctggctttctgggaaggttcttggagaccaaccatggggcaaaccgatcccgggatgacatcaaaggcttgattttggttaaaggagaataaacaatgggtaaagagacaaaccaatgtcccaagagagccgtctcctgggcgtacacagcccgtgctcaatcagtgtcccaccagtgctctagactgagtcaccaatgagagccatctcctgggtgtacatagccggtggtcaatcagtgtcccaccagtgctctagaccgagtcaccaatgagagccatctcctgggtgtacatagctggtgtcagtcagtgtcccaccagtgctctagaccaagtcaccaatgaactcctgcactgctgagattataggctcctgctgccatgcctggcgtttactttggtcctgaggctctgaaccaggccttcttgcttgcacaccgagcactttgtcaaccgagccatctctcccaaccccttaaaagttatttttgaaggtcaacaataataaatttttttaagaaaatcgtgaatatgtggtggaattctacattaaaataagcactgttcacttttatttagtttgcagggctgggaatcaaactgttgcctgtttttgtgtatgggaagagacctccctcttcagaaaagggacctgagtgtctgcatgtgaagtctgctgaaggcaattccctttttgtcacagaaagaaagctttggggggaaagcaccatccaagacaggttcccaccaccttgaaactgttcttggctacctatcaggcacctctgatgccctcttccacctcctggccctcttctttagaggcgattgacttacgttcccccttagaaatggctcttcccttttgcagttcacggagttgttttgacggcctggtaagatggttaatgtaaacctctttcaacagcatggagctcaggattgcattagaaatgctaattttcagagttctcctttctttcttaacaacatagttcaagtgatgcttaaaataatggatttaccattgttaaatcatcctttaattgttataaaatttagagtattgtcatttttgatcaatatataaagctttggttaatatccgtgtatgtacatgtgtgctgctctggataaattaccagaagcaaatgatttattatttttgttgtatattcggaggacgtgaatgattttaagcctctttatctcaaacttgctttcagataaagaataaaccattttatacttccaattgtcacataagataacagctttcagtagtgtgtactatgccttactcattctaacttttttctatagcaagacattttattcttttaatttatatttatttatttacacatcaaacactatctcctttggcccccttcacagagaccttctccatctcccccctgcccttctcctctaagaggatgctcccctctgagtaaatccccaccctggtgcatcaagtttctgcctgggtgggcacatcttctcccactgaggctagacaaggcagcccttttgggaattgaaaccacagtggggctatagatttagggagagctccgctccagttgttgggggttcacatggagactgagctgcatgtctgctacatatgttctgggggtgttgttccagcccgtgtgtgttctttggttgttggttccatctctatgagttcacggaggtccgggttagttgattctgtcggtcttcctatggtttttccatccccttcagggctttcaatccttcccccaactcttccataagagccccaacctccatccaatgtttagctgtgggtatctgcatctgtttcagtcagctactggctaggagaggacagttatcctaggctcctgactgcaagcagtatcattaacaatgtcagggactggtccatgggatgggtttcaaattgggctggtttttggttggacactccttcagtctctgctccatctttgtccctgcatttcttttagacaggacaaattttgggtgaaaagttttgtgggtgggttagtgtttttattcctccactggggatcctgcctggctacaggaggtggcttcttcaggttccatgtctctactgttaagcagctctgctaaggtcacccactcctgggagctgcccccacctcaggtctctgggactttctagagattctccccactcccaaccctcagcagttacagatttccagtcattctcctggccctctgggtctctcgcctttctctctgaaccaagccattttatattgaagcaatttccttattttgtgggtagagtcctttctcccctggtatcagtgagaagtactattgcacacagctccacggtatctttgaaggtacgatgactctggcctgcggcagtgtgatgcccaggaatgtcttgagtggaaagcaggactcaaggacgtctccctggcagctcagaggctctgaagttgagacccagttcctgaagctgtaccagcatggagctaacacctagggcatagggagttccacaagccatgcatatccacccagccatgggtcctttctgcaagaggcagtgtgctcacctgcttgcactggacttgcctgcgtctttcccacagaggctgtgcatggccctataacatggtaataaattaccttcttgctacaatcaacccaattatgtcaccacggtttgcagagagacccctcatgtttccatacactgtctcctacccctctccgtctaccttctgagtagaaacccgtcccttctttgtttaaatgttgttaccgagtttcagaatcgttttatacacgtcccgatcgactggatcttatatgatccatccctctccagggaagatactgttctttcccaacaggagatgaagtccgaggctctcatctgtggttatggctcttgggctaaagtgtgattcccttctttctgtccgctcggcctgtatcacaggtgacattttatgtgtaagttacatatgctgcacagtttcctaaagacttcctatgcctggttgaccttaaactacaaaaatccaagagacagcccagcaatgaatggaggaaaacatccttgtagaggaaggcatgccctcactagacgacatctctctagtaagaggtagagctggactggcgagccaggacacctaattccagagacatagcttataccttatttccgtattgatccaatgtctctaaatcctatacaaccctaagaaaaatgatcacatagactgacacacaaaattataaattaattcctaccaacacctgtctgctattgggcgtggttgtttttaaggtgtgtgtgagcgagcctagcatgtcacactctgtatagttcaatcaagttcaaacttttctgtcgatctctgctatagcttattaaaatgaggcagtggggaaagctgaggagggggtcactcacttgtggtgggtttcattgactaatgccggtgccagcgttggcttctgctctgttccttttctcaaagtgctaatagcaagattctgtccccacaaccctattactggtggcagtgggtataatcaagtagggcctgcaggataagtcaaaagattaaattaagttgggatttgaatccccactaaacaagaatcaaacaaagattagatttctggaccccagtctcagaatggctttcaagggctcctctcaaacaacaacaaaaatatatcattattcacttcgaccatgaccatgggcatgttaaaggaaatgcagacagagagagatgagggaggccaaggaccggcccgcgatggagctgagttctgcatccccagagtgatcgcgactcccagagcttgtttgtttcctgacccactcaggagaaggcagacattgaaatcacacccagtaacacagaaagcggagggtctaagagagacccaccaccctgcccttcacctgtctgcattcaagttcagttaacataaggctttttgaggtttggaagagccagtaagtaaacaattaaagaaagtgtccgtttgggtaagagtactttactgtcaagtaaagatgggttgtaggaatgctttttctcttccttgggttttccttcattctttttgtttgtttgtttgttttttgttttggagatctactgtcctcaactatatgtgtcattgtgaaattaaatacaattgactgtttttctattgtaccagcaggtcttaaatggtgatttcctgaatttgattctctgaacacaaaggttaccactttaactctttttaaacatgcattgctaaatctttcattccctttccctctcctcccagctccacttgctgcccagcccagcccacccagtgctcgctctatttaattaccaccgctgcttatgtacagatagaaatgtgtaggcgcaaccttctgattccatctagtgctgctgtgtgtatgattttagagctgacctcttgggatcatttagagatggatgaccctgggggtggctgctcttcctctctcagcagtcattattcatcagtagccctttatctagggatggagcccgcccccaccccccattcatgttaccatcttagccagtgttgtgattgcttggatcttctttgggtgaccatattgttgaaatttcttggctgccacttccctgtcatatctacaaagacacatcttgtagcagatgacatggtctcctgattcttacaatctcactacagtctcttctaaggtgttccttcagccttagagatattcagatcgtgttgtacgtacgccagttggggctggcctcctacactcagttcttctctgcagtttggccagttgtggatttcagcaatgatctctgtctgctgcaaaaagaagcattttggagaagggatgaaagctttcagtgtaatctctagcagtgttctagatacttatcctcgcacccaaagactgattcttgacagcaagtcacaatctagatgatttccacgacaatcacactttgtaaagaaaacggtcaaatggacaataaaatatgtaaatgggttgttcaggttgccttattcacaagaaaaatggaacaatttagattttttttcatagtcaggcaatcgaatatcgctggtggttcttccaattggaagtgtttgcttcggttcctccatttctcctgattcctggatgagtcaaatgcttcccgggcatgggttcatgctacctcaatgtctctgctctggggatttcactcttattatggtcctcggcatggggcttaattacctcacaagggtggggaaatagccaatgtccatatttctatatatcagtaagcttcaacagcagatggaatctgccaacatcaaaagtctgtccattctagaatgtgtcagtcagtagtagctattactaaaatgtgtccctaacatccagataacagctcacgaagcagagtcacctctcagacgaggagacaagagatgtcatagaggggtggatggagagagccacagataagactcccccttctcaatactggagacatttgtggttcataccctaatggcctgacctcatgttcccagtgaaaagctcattttatagtagactttttgtcctctgcctttctgtcctcttgacaagtaaggaaaaattctccctttgctagaagtcggcatccattttacttgtggggagtgttatggttttttttgtttgttttttttttcctgttcagtaacatggctactcatgttccgagttgcagtgtccattcctgcgtgtgaatagatatgcatacctgtgccgtagagtgcacgtggagatcagaagacaatctgggttgtcagtctgtctgtgtctctcatcttgtttcagccaaggcctcctggttgttcgctactgcataggccagagcagctggcctgaaaactctgggaatgctcctgtctcagcttccatgggggtgctggggttacaggcgagcaccaccactgacttctaatgggatgatgctgtgtagggcttggaggtccagtcctcatgcttacacagagcgctttacccacagaaccatcggcccagccctctgctcttaatttctggtgccatcacgtctaatcaatttcagggttagcaagtaccagtttccacatcgccccttggcctgatagagtgataacagcccagctagacgaaaggattccatctcacagcaggagctggctcatctctgtggtcttgcttcctgtgctgtttgctgtctggtcctacagttttccctttattggatgcctagttatacattcttcttgtaagctctctctcccatactcttttcttgcttcacacgggcacaatgggcaccgagcatctctgccgttaccacctgaagacgtcacatgtgcagaagaacaacaaagatcctttccacttggggacacttcccttgtgtgtcccaaattaaaaataatggtgaaggctgacttctgggtgcttttcctatgcagtcactgtgcaaagtgccatgtgcacattctttagagatgagggagcagacagagggactaagcaggctataaattggagatggatggtgtccacaggactccaaacaaacggagccaggtcccaggtgtctcatcccctgaagagttttagttcactgatgttcccaactcaaaacaaagctgcggtcacaggagcagctaggggatacttgcagttggccatgcactctgctattgaagtgtcctttgaacctctaagcccatccataggtacacattacatcatctgccaggaatgcaccttcccactcttcctgtccccttagcccccgcccgcctgtcactatcaccactctggcctctgttgctggaagagtctgttcagagaaagcactctgacaagctcatctgatgtgttccccgattccagccaccgattagcccttaattttcctccgggctctaagtgccagaaattatattcctgtggtttcttgcgcattatgtcaccctgttagaatgcaaatccccgtgacccccttgttcacctcagtattcccgtacatgtaactgtttctgacacagcgcagatgctcgcatttgcctaacgcataaacagaagaatgcatttttactagcttacaactcatgcactcacggcccctgattgtcgcctgtgtgacagttgttaggtggcttttctgagtacagttccgttacttcacctggaagatggggacagacacagtctttcactgaggtagcttttagatttccaggaagcagtgtgcaaggaccatttaagactaattggagtcagggttctgcaggaggggaggggaggggagaagtgagtcccccttctgtttggtctttattcatcaactatttaaacagcctccccttcactccactctcggcacaaaaatacaaaattgtacagtcatggatttcaaaggaggatttaaaaaactactagaaatttaatagatttggaaactgggaagaatatacaaaattagatcttcagcatcctgtattgatgtaaatttacaatgttaggattctttggctctaagttgaattccatatcaaacaaactaaagcacaaaaatatactcacttcactaaaacagccaggacagtctggcagggccgatccgtcagctcagaggcgttggcagcctgtgcctctctctacttctcagctctgcttccctgacttggcgtcaccggcttcacaccgaggtcggttggtcacgtctcttctcaagctccctctctgatgacagatactctgcctttcagctaaaagtgtccatagactgagagacggagagcacaggtttctccttgttcccagtaagagtttccaaacagtggctagctggcctggctctggcccaggatccatggacattgaagcaaccagggagggagggagggagggagggagggggannnnnnnnnnnnnnnnnnnnnnnnnnnnnnnnnngaggggggagaaggagagagggagggagggagagagggagagagggagagagggagagagagaggtgtttttgatgggccaggactggtggatgtattggagccttaagtcaacagtagactccaccgtttgccctgagtcaggaggaggagccgctcctgtaaaaactgagggccattataaccaaaagggaaatttggaaagggggccacagaagacattcagctgttcccttggcttagaggagtggagagactgctcacttggtcaagttcttgacacacatcttgagggcctgggttagtgtcctcagcaccagtgtaagatgagaatgatagcctgcagtcctggaaccagggaggcagagacaggagtttatctggagtctgatggctggctagtctagttgagttggtaggcaccaagttcacgcacaagcgcactcggacatacatgtttatattagagagagagagagagagagagagagagagagagagagagagaaagagagagaacagatagtgccatgcaatggtgccacagcttgtgggccacaccccgttctcagtcacgtccgtcccgtccgttctcagtgctgcccttctgccttccttgttgactcaactctgtcttccaccacggctcactgtgcactcccaagtcctcagctgagatgacactggacgttcacagatgaaatgctaagtcctgatggccaaagaaagacaattagacaactagatatgtatacacacatgcacacacacatacacatgcagagagagagagagaaagcacgtgcagtgtgaacaaccattcgaaacatcttctatttcacagagattgtagacaaaggaagatctgcgtcagggaaaatccagtgcattttgtttcctaaaaagaatcggtgtgggagtttattgttttctctcctgagggataaacattttaatttaataacagtcaaaaagtgcctaagtgtgcttgaggaaaaaaaatatgatgttcctaggagggcagattctcttctcttgctgaataattggaagcagcattcagagcagaactattcaaaaaatactgactaaaataccccgtgtcaacatcaataacaaaacgactgtagtaaacatatttatgtcccaccctaatatgggacaggcattttacatatatcatttgctcagttcctcatgtcaagcctgtgaggtgtggggtgtctattttacaggtaggtaaactgaggcaaacagaagttggccggcttgaaagtaagggatggagatggcattccagtccaacactgtatggctgaccttgacgcctaggttgacatgaagcattttaataccaggtctaaccgagtggcataggtaagtcgtggatttgtacgaagagagcgatcaaaaagggaagagccaaaatagaaaaataaatgtacgcggtatttattaagagaatgttgccacagctgaggtaacagacagcggggtggccaagccaagaaaataaaattgtatgtgtgaaagagagagagagaaaacatacacacaacaggaactgtcacataaatagaacttggtcattcttgtgttgcagggcctctgggaagggggctggctgttcgcacaggcatagaaagcagtgggcttcatcgatcatttctgcctctctcttcccggctttggctgtagcatgtggtactgggctatgctagttatgtgtcactgggataacatacttggaagaagccacataagggagggggctttattttgctcacaaaagcttcttcgtgggagtcacagcacagcagagcatgtagctcgcgaaggcagctactcacactaggctaacccataagcagacagctcagacagaagcagaggaggtttctaaccataagaggcctggtcccagcgattcccccctctgccagtcatgcttgtttgccccaaaggcttcacagtccccctccaaacagctccagtagcttagcaccccatgttcaagcacacgagcctatagcacgttaaaccataacacctcggaaggtggttccagagagactttctggatcaaccaatgtacaaagaaaagccttagtctgcagtccaggtcacagctaatccttagggactgtttacctcagtccaggcacaacaactaattaaataccttagagtgtctccctgaagaacactcttcattgactctgtttctctagaaaaacaaaacaaaacaaaacaaaacaaaacaaaacaaaacaaaacagcaaagcaaaaaaaccccaactgagcaccaagaagtatgaacttacttaggtaatcaggcccctccatacagcatcagagcctgtgcccctaaacactgggctgcacctctagatcatggcttgcaacattttttcctacaaatggcctgatagtaaacacacaggttttgcaagtctggcgtgagctacaaattttaatttccacaatgcagctacaactacctagactataaagagatggaaggacaatatagatcaataaaactttatttataaaaaacagacagcaaggccgagttaccacaattggtctagactagtttataagcctacaatgattgatcttattgcttataggtaattgtagacataagacgtgtgtgtgtgttcacacctgtggaggccagaagtcatcatcaggtgtcttcattgtttgctagcttacttttagcatggcgcttttctctgagcttagggctcatcaataggctggcttggctggcctctgagcactcaacatcctccagtctttccgcagcagcatgcttccaggcataccaacacagccagctttttatgtgggctctgggatccagacttaggtccttgtctcatgcagcaagtactttacgaattgagccttctccctggcctaattctataccttgtaatagtcgatttccctgcaagcttcctggctttctggcattccatttcctcagccttgtgacacttctctgagttacgctgatgacaaatgcttgctgaaatgttaccgacatttctaggtctagacaccatccccgcataatctccatttttctgttgtcctcttcatagccctggaagctaggtgtcatcatccccttggcacaggtgttattgttgaggtcagcgagctaaagaaactttatcatatcgcaacagtgttgcaagttgagctgagacaaaacatcagacctaacacctgggctagcaagctttctgtagctgtaatgtttgcctcagcaaatcaacttacaaagaaaaaaaagggttacttggacattttagtcgtccacggctgactcctgggtttggggacttgccatgagacaaagcattatgtcaggggacaagtgcctgagctaaagcatccatctcatgacagagatgagagaaagaaagatgaagggttggggtgcctctaacctcccagaagtctccagactgtcatagctctccgtggtcctacctcttgaccatggtggtgcactgtagacaagcctggatcatggggtcctcctggaaacacagtctgagtgccggcagagcctctccttcttgcttgtcatgatttctgcatctggctgtggcagagaggacattcaaatgtacatttcagcaagcatcctagcgattcttacctgtactcaaggtgaggaacccagcacagacgtcctacctgaggacacttgtgtgaggctctctgagagcttccaccctgggtaagagcttggcctggagtccatccaacttttgggtttatcaatcttcccattctttcctctttcttcattacctgaaggctcatttgtctttgtgtctagtcagtccttctggatggttgtggacaggggctcagttcatttctctgtagctagagttcatcatagagttaagctttatggatactggccaaatgagtgaatatgttaattcataaaaaccttgactccctggaatataaaatgtcttcatagctgcctttatctgtgtccagtccctggttatttccctgcattcccttgttttagtttgctgttagtcaccttctgtttctgctataagacagcatgcctctattgattctcctcataaaatacacttctcttcttactcttggtttgaatataactcaagagaactggagaatatgactgtttcatgggaaaatacttctaacaggaatctctgctaaggaattaatcaattaattaaccaatgaatgaattattgattatctcaagacaaaattcgtcaagaagcaactaaagggagaaagaatggattctggtatacagtttcagaggggtgtagtccatcatgccaaggaagacacagccgtaggcagggagagcatggtagcaggagccacaagctgacacatcacagagcatccatactcaggaagcagagagtgaatagatagtgtagcctggccataaagcctcccacgctacctgccccagtgacccacttcctccagcaagcctccaccgtctgaaggctccacaaccttccccaacagctctacgttagtaaaaaaaaaaaaacaaaaaaaaaccaattgctcaagtatgagagtccacaggggacattccacattcaaatcacagtatcaagtaattactctgtggcatcccttgggatggatctaaggtcttacacatcgggcaagtgctcaaccactgagctacacccccagccctcttttcacctttgactttaagacaacatctcactggtttgctgcggctggtcttgggtttgctatttagctccagcagggcacgtggtgttgatcttcctgtctgggcctcctgcatgattctctggggtcacggacctgcatcgccagatctattttatatgttaacatagtcatgagcccttattggcacttaaactgacctaaggggtgatcaccctagttcttctttcaagctttctgtttagttgaggaattaagactcacattttcttaaatagaaaacaatgtgcattaattatcctatggtaaattgcattataatgaaatatcaacttctgtcaatttcatagattatgtggcttaactaacacaactgtctatttcatctctagaggtgagcaggtccagggtcaacatgccagcaggtcagatgtcagggaaggtgtccatcccagttgacaaagggctgtctcaacactggattgtctcatagaacacaggctgagattcaacccttgatctcttatcagttcattcacaagatcttgaaacacattctttttaaaggtcttccttcctggtggcatggtgggacctaggatctaaatgcaagtcttaaggggcagtgcagcccaatgtctatgacggtttgttcaagaaataactatttaactgttacctcttctcaccactgtcaaagtgtcagagacacaagaatgagcagcagcagagccagtggaacccagaggttcatctagagaaaaagaccatgagccaaaaagccagtctgagaacaagacgatcggtgacggtggtgacggaggtggtgacagagatgagttgagatggggccacatgattgacctacgaggtggcatcagataatcggaagtctctgagacagaacttgagagacaaaaagaacaaggtctgaagactgagggtggagcaacccaagctgagaaaacaaagcaacaaataagagaaaaagcaaacgccctaagatcagtaaggaggggatgttttggaagggctctggtgcactgtggtttggagtagtaagagatggaaaccaagaggttgtcataatcccaccctacttggtattaagatggtgaggagttgagagtcagtctacatatatcatgaaaccaatggcagaatcatattgggatattagcagaatctgctgagagttttgagataaccattttggtcgtgaaaagtcaagggacttttggtcaagggacaagagcaggagtcaaaagacagtggccctcatccaagtaaggagctgtgcaggatagagaggggttatttgctttctgatgctgtgataaacacagtccaaaaccaatttgtggagtaaagggtttatttcatcttacaggatcagaccatcattgaggaatctcaaggcagagctcaagcagaaaccactgagcaaccctgcttatttataccatcttatttataggttcacagtcagttgcccttcttagaaaacttaacatgtgatgggtgaatttgttaagctggagatgagagaatactggtccaagagagaaatcaaataaatggtggtaacgaaaaaaaaccaactggggatacaatttggaagttgctgactgttggtgctggttagagccatgaactcaaagaaactccctaaaggagggttggatgctatgagtgagaacccttctttgagatgggccagcagactgtgcccagagcttgtaccaccatgagattggtgacagccctcagaagctaagatgagaaagaaaaatgtctggtgggctgtttctaatgaaatcaaattcccagttgtttcccattaggtcattttgtcatttattcagctttgctaaatccatacctttgttttgatgtacacccccctgccccaacacatacacactctttagaatgtaggcaaacagaactgagtggctgtagtccacccagtaagccctacatcatcttcatggtagtcacagacatgcgtccccttagacacatccatcagtgaattcagcattttccaaggaacaaaagaaagggtcggcccatttgcacatggagaatactccctcgatgtgctaagagttcctaatgaggacagcagccatctggcaaacaacccactagattgaaacaacaacaaagtcaacataagcaaaatatgtaaagttgttgatcgctgacagacagcctgttgatgggcatctatttagctttcaaagcagtctggcagatagattaaaaaaatccatcagacctgtaaagccgtaaccggccaaatttccccagggggcctttctgtatggtacttatcatttccagggccgtgagagctctgcttgttccaggcgtcattaccctacataggacagcaatgccaatgtgggagccatcttagacgcatcaccaggggcaggcataggaggcacaagcctgtgtgcatgctggcagtttttggcctgcaacttcgaggtgtgctaatggtcatggctttattagaggtttttggtaattatcttcttgctgtcgtgaagtcttttcctgggagcccacagaggggaccaccgaacatgtctatcatttctgaggcatgtgggaaccacccagaacatcaccctggttcctttagccatcacagtccctaagaaagtcaacgctgtgtgggttttcctgcccggtgaaatggtttccttgttcctaactgggccttatgtccttgggaagaaactaaaaaaaaacctgagttgcctccagtttaggagatgctgaagtgggagactagacagatgtgggtttctgaaggaaagaacgatttgtccagcatactgcctaccttccctgaaaaagaagtgaaagagaaagagaaggaggaggaggagaaggaggaggtggagaaagagaaagagaaagagaaagagagagagaaagagaaagaaaaagaaaagctctctgacaaaagaagccattggtcatgacctcaggagaacggaaatacagaataaaaacaatttcaatctgtgaagtccagtcaatgagagcaaacaggccacccagcaagggcatttcctttttaatggttacctctgagtagactgaacagtgcatgcgtgcctatgtgcacgtgtgcacgcgctttgatttttctcctcttttaactgggcgtgaatacatgaaggcacatgtcaccctgattccatcaccccaactacgtgtgctaactgtcaccagtatcttcctttgggagtgtgtgaatccgctctcccccattttctcacacggcagttcctcccgtgagcaaacgcccactgtccctaaagatttctctaatggaggaaagagtaattaaccgcctcccccagacgctggcttggtggccagcccctaatttgcatcctttctgcagaggttccaatgtctcctggatttattgccgcactaaagtcaccctttaaatcacggatcaccatatcggtatgtggctaaaaaaatgttcacagcattgtaattttatgtactagcaataaacatgaaaaatgcgttttggggttgtttaacattaaaaataatgtttgggaaaataaattttaggagaaatttagggctgaagaaggggaccctattcagtcctagaaacttggattcataaactgaacagcaagttggagggagaccagagtcgcaggggagataggtcagcactagggcctttagtgtcgggattcatatacccctgacaccaaaagcccctcctgattgctctccaaacagcagtagcttttatttctaaagttggctagagattgctaagcaattgccatttcagaaaacttttttttttttcaggaatgaaaataatgtggcccatgatgcttttccaaggagctgtttggcctccgtcaccaggacaacagcttgtgaacctaccctcacctggagagttactctggggtctggggccatggatgtgacacttggctctattcctggacacgtgacttgtgagtggcactcatgacctacaagtacaaaccacccggatagagtgaatgagtctgtttaccctgctctgaatctcacaccagctgggcgacccggggaaaactcctcacactttctgttcctactccccaactttttagtttgactttgagaatatttaatggccacacatcaaagcctatgcccaggccagggcagtgtgtcgggccatagtgtaagccgcgtggacctgcgtttaattcctaaaatgcacatgacaagctgggtgcagtgagtggtgagtgtgcgtgtgtgtgcgtgtgcatacacgtgtannnnnnnnnnnnnnnnnnnnnnnnnnnnnnnnnnnnnnnnnnnnnnnnnnnnnnnnnnnnnnnnnnnnnnnnnnnnnnnnnnnnnnnnnnnnnnnnnnnnnnnnnnnnnnnnnnnnnnnnnnnnnnnnnnnnnnnnnnnnnnnnnnnnnnnnnnnnnnnnnnnnnnnnnnnnnnnnnnnnnnnnnnnnnnnnnnnnnnnnnnnnnnnnnnnnnnnnnnnnnnnnnnnnnnnnnnnnnnnnnnnnnnnnnnnnnnnnnnnnnnnnnnnnnnnnnnnnnnnnnnnnnnnnnnnnnnnnnnnnnnnnnnnnnnnnnnnnnnnnnnnnnnnnnnnnnnnnnnnnnnnnnnnnnnnnnnnnnnnnnnnnnnnnnnnnnnnnnnnnnnagcctcacacagctgttgctatccctagctccactcagtgtcttctgtcccctcgcaggcctaggaacagagagagatgatcagaaggatgagaccacggagctccagccagaccagtgcacggggatggccttgctttctctgccgtgtatctacagagcctcaggatatcccaaaacacaacgaaagggcgtcatggtcaccaagggttagaatgacactcttgctgggtgtagagacaaacttacaaacactggacaatgaattacaaattgaaagcaagtgaactcccacacccttttctaacccaaccaggcggatgatctaacaaggcggccctgaagccc

SEQ ID NO: 494 - DNA, 985 bp, Mus Musculus
agtgaaatgttttaagtccaattggttaagatgttgtctccgagggctccaactccccctccatcacccttcacccttcctttggaattaggtgctgtttgaatgactcctggcgttttgaaatctggtttacagaaagggcaaacaggccagagggtgaggaagccaaggagtccagagcccgaagacaacactgctgaactgaaagaggataacgaggaggccagctaaagtgtcagagacacaagaatgagcagcagcagagccagtggaacccagaggttcatctagagaaaaagaccatgagccaaaaagccagtctgagaacaagacgatcggtgacggtggtgacggaggtggtgacagagatgagttgagatggggccacatgattgacctacgaggtggcatcagataatcggaagtctctgagacagaacttgagagacaaaaagaacaaggtctgaagactgagggtggagcaacccaagctgagaaaacaaagcaacaaataagagaaaaagcaaacgccctaagatcagaatgaaaataatgtggcccatgatgcttttccaaggagctgtttggcctccgtcaccaggacaacagcttgtgaacctaccctcacctggagagttactctggggtctggggccatggatgtgacacttggctctattcctggacacgtgacttgcctaggaacagagagagatgatcagaaggatgagaccacggagctccagccagaccagtgcacggggatggccttgctttctctgccgtgtatctacagagcctcaggatatcccaaaacacaacgaaagggcgtcatggtcaccaagggttagaatgacactcttgctgggtgtagagacaaacttacaaacactggacaatgaattacaaattgaaagcaagtgaactcccacacccttttctaacccaaccaggcggatgatctaacaaggcggccctgaagccc

SEQ ID NO: 495 - protein, 104 aa, Mus Musculus
DQNENNVAHDAFPRSCLASVTRTTACEPTLTWRVTLGSGAMDVTLGSIPGHVTCLGTERDDQKDETTELQPDQCTGMALLSLPCIYRASGYPKTQRKGVMVTKG

SEQ ID NO: 496 - DNA, 149844 bp, Mus Musculus
  misc_feature (1)...(149844): n = A,T,C or G
caaaatttttgctagagatccaggaaaataaacaaaacaacaaaatcccagtgccaccttggagccccacccaatttccaggctgcctgaaaacttcttggctctccggaaggtgcactgctgaacaccgctgtcactgtcagggcgcatgcatatggggatctgctactgagatgcagagcaagccttgcagctgactgcgacgcgggagctccattgccgctggcatgggtgagtcgttctgcccgcgcccagtgcccgcgaatgacccactctacaccaggccgctgttctgcacggggagtctcagttcccccaagaaggtggctgagaggctgagcaccctgacctcttggccagaaaaaaacaaaaaacaaaaaacaaaaaacaaaaaaacaaaacaaaaaaaaccagaagctgctggagcttgagaatgttcaaacccttgaaaaagaaaactagaacctgctctgcatgtgtctgggtggttggaaagctttggtggctgttgctggtcacatgattccaagatctgtttgtagtggtgaggggttccctgaaagtttgaggtagggaggcggagtccaagctagtacgtgtgactggacattaaatgactacagaggagtgatgtttggtgcttggtgcagaagcatatccccccccccccatgacctttactcaagtgtgctcccctatactctttcagacatttgtggattaggcactttctggtaaagctgttggtgacgattgtatatgctagttaaagggtcagtttcttttggaagatttgacctattggatgttgagctaaaccacgtttggattaagttgaagtcattcggtgtctaatggcaagaactaggtatgtgataagatcttagaagtgtctaagacgatcccaacttgagggaatgtgtgtttaagggtatctgcaaatggagctaaagtacttctttacaatatgcaaaacaatctcagttttcatctcaggacaagggttagagcttaaaacattgtgggatattctgtaaatagaaaacctcagtggtgtctgaatttcctgtttgggctttagttactctatccttgacaacttattttataggtgacttgtttcttttcacaaggatgtactattcctccaccttggcgattccatttgtttgtaatcatcttcctgctccacccctcagtaggctcacttggttctcacacttctgactcaggctacctgatttcctgtgtctgaagcccttgaccaactcagtgttgtattcccttggttgcactgggaattgctttataaacttttcaaagcatggtggaaattggtagcaattggttttctccttgctgatcttcttcctcttcgtttatgggtctacaaatatcgggatgttctcagcaagctttaagagaatggaagtatcttaaacattgtcatatatagtgttgtgaacccagtaagtattcattactttcaaaatattcattattttcaaaatctttgttatttctataaattccagaattaattctagtttgtgaagcatcatgtaaattatagcaaaatataaagaggatgcccttctccttgtgtgtggagtctttgatgacttttgggtgtatgtcttcacagtgtacagctcatgaatgttaaatggctattaaagttcttactctaactatgtctgtgctaggcccactagatatcaagtattaaaatgttgatactctagttgaaaactgattctcagtttgaagtaatctcttagtaattggagtaatactatgggaaggatacaaagcatccctgggtgggtaatatcaggatttttcaatgttttgctttccagttgtaaaaaatgctgtcatgtggctggggatatagcttagtgatagagcacttgcctaccttatcctgtgctcccaacatcaccatagtgtttttagctcctaataggtgctcctgtatttattaccctttgtccagggatggctgcagatactggttctggtaagtcattggtggcctcacagtagttttgatttgtgcagctattgattaatatgcttgccatcttccttccttccttccttccttccttccttccttccttccttccttccttctttccttccttctttcttttcttccttccttttttctcattaaattttcttttatttacttttaaaaatttttttttcttattggatattttctttatttacagttcaactgttattccctctcctggtcctcccaaaacctattccatccctcgtcccctgcttctctgagggtgatcccacaccctgcctcccatcacatccttgcacttgaattcccctacactggggcatcgattctctcttcccaatgatgcccgtcaaggccatcctatccttgattggtggtatagtccctggaagctctgggggtgggaggggttctggctggttgatattgctgtttttcctatggagctgcaaaccccttcagctccttcagtcctttctcttacattgaggatcccatggtggaccctgtgctcagtccaatggttggctgtgagcatccacctctgtacttgtaagactctggcagagcctttcaggggacagctatatcaggctctgttagcctgcacatcttcgaatccacaatagtgtgtgggtttggtggctgtatataggatgaatccccaggtggggcagtctttggatggcctttcttcagtctctgctccacactttgtttacttatttgctcctgtgagtattttgttcccctttctaagaaggacctaagtactgacactttggtttttcttcttcttgagcatcatgtggtctgtgaattgtatcttgggtattccaagtttttgagataatatccaattatcagtgagtgtatgccaagtgtggtcttttgtgattgggttacctcactcaggatgatattttctagttccatccatttacctaagaatttcatgaagtcatttatttaaatagttgagtagtactccattgtgcaaatgtaccacattttctgtatcaattcctctgaaagacatctgcgttctttaaagcttctggctattatatatataaggctgttatgaacgtagcggaacatgtgtccttgttatatgttgaagaatcttttgggtacatgcccaggagtggaatagctggatcttcagttccaattttctgaggatcaaacacaatgatttccagagctgttgtaccagttttcaatcccaccaaccatgcaggagtgtccctctttttccacttcctcaccagcatctgctgtcacctgagttttttattttagccattcagattggtgtggggtagaatctcagggttgttttgatttacatttccctgatgactaaggatggtgaacatttcttcaggtgcttctcagctatttggtactcctcagttgagaactcttttgtttagggttatttgattctctggaatctatcttcttgagttctttgtatatattggatattgaatgcaaatgggcccattatcatctccttgtataaagctcaagtccaagtagatcaaagacctccagctaaaaccagaaacactgaaactaatagaggatagccttgaacacaggggcacaggagaaaatttcttgaacagaacaccaatggcttatgctctgagattaagaattaacaaatgggacctcatcaaattgcaaagcttccataaggcaaaggatgctgataataggacaaaacagcaaccaacagattgagaaaagatattttccaattctacatctgatagagggttaccatatttctaatagagggttctcatactaggatcaatttacaattttaaatgaaggatcatagttatgggctgttgattctttatctttgtccatttttctactttgccatcatcttcttttcttcattttcctttattactttttttttggtcctatattatcctggccttgagaatgctaagttaatgaataacattgaatttattgcctattttcttctattactctagttctgggatcgcaggtatgttccatcacatgacttagattgtgtattcgacgtaaaaactctacaaagttagctatctcctcagttctttgtttttacacacagggtagaccaggttcacatgtattttcctgtgctgggattgcaggagttagccagcatgccctactggatatttatgtaaccaattttccaaagatgggagtctctaaatctggcatgccagaatgtctttgataactctacttcaggaggtacaggtaagaagagctaatccctttaaattgaccccccctcccaaatacaataaataatttttgtaataatggaagagcatgtatgttgaggttattgttacctgtatattgcaccagaatatgtacttaaatcccataatttgcccattacttcaaagaattaattaatggctgaggagataccttaattggtaacgtgcttgtgacacaagcatgaagatatgagtttccctagaactagcattgaaaaaccaggcatgctggtgttgactcttttaatctcaacacatgcagagatttgtgacatttgtgtgccagtcggtcagtcctaatccctgagccccagactgaagagaaaccctgtttctttcttttttatttatttatttgcttatttatttatttatttattataacatattttcctcaattacatttccaatgctatcccaaaagtcccccataccctacccccacttccctacccactcattccctttttttttttttttttttttttggctctggtgtaaaggtatagagtgcctgaggaagagcacctgtgtttgtccccttatgtatgtgcatagtgcatatatgcattcaacgcagatcctctggaagaacagacaccactcttaatcactgaccaatctctccagcacaggcagtttaatattttcaaattacagattccacaaatttcatacaaaacaaaatgatgacaaccaaacaacaatcaaacatactcatacacatgaactactatatataagcacaaaaataaaaatttagtacaaaaactaaacaacatatttaaaaagaagttttcctgtgtgggtagcaacaattggttacaccttgatgcatacttgtcactgcaaatacttctctcattgcaaaaactatcctcttctttgtcaattctgccattcacacacatgaaggtatgggtaatttacaaatatgacttaatgtcatagatggaccagttaaggactcaaacacacacatgtccactcgcacatgaacacacacacacattttggttaatattgagttcataatagatagaacatattgctctaggcaatttcaatgtctttataataatcctatgtagtcagtattaatattctatttatctcataaataatataaatgaaacagaaaaaagtaagttgggtacatcattcccagagatcaaagctggggattcaggtgctgccatgtggctcagaggcaaaaaggaactatagatgttccatatactcatccagtgcttcaagctgtaggtatcctcaaatgagggctgaaaccttggtgctataaggcaaagccatgttcccttgcacttggtctggaaaggaacttctaagtcacaaagtatatttgagaactagttcctggtgtgtcatgtgcaaagctccaggcttacatatttgggtactgatgtaactgtacatgttttgcccattcacttcaagtacacgttaaagagcagctgtacccaaacttcccatgctatatattaagacatagtgggtgactgtgatctttatgtggtagaatcagcagataccatggagggccacatttttgtgactaccttgagttcaatcatagtggttttatgcagaattcataagtagctcaaaatgtattagaaatgtattgaaactaaaggacaaaatgaattataataagtttttgttattgttttgttttgttctggtatttttcatttctgttttttgtttatttgttttctatttgagataaggcttctctgtgtaaccctggctgtcatggaacttgctctgtaggccatactgttcttgaactcagagatcaaccttcctctgccttcaagtgctgggattaaagctaccacttcctgtctatttgtaatatttttaaaaagatttatatttattttttagttattcatgtacatgtgtgtggaagctggaaaagtgtgtcagattccctggagctggagttacaggtgttataatcccactgatatgaatggtggggaccaaattctggccttctgcaagagctcttttaactgctcagccatctcttttccttaatttactttaaatcattaaatgtcacctattttcacttgctcttacttcaaaaattgtcctatgaatataaacaaagggcatatagctttaagaatctatgaacttctagaaacttaatcaagttttctgactggtgatggatctccagtgatgtctgtatagactgaccctgacttcagagaacctttgacttttgaatgtgggagaaattcacgccagcatagatcatgggctttaaatgtgcttgggctttggtaggacttgtgtgtaaatctcagttttgttgagagaaagtttcttcgagtatctgtacatcagtttaaagagttgtgatgtgagaaccatatttacttacttccaaattatgtgacaatattacattattaacatgaacattttatttgtggaaaacatctaggtagtgtatctacatctgctctgactgtgttggctgagagcatccagatatggtgatttaattttgaaagcatttgacaacttctatgtttacatagtataccttactttgtagctttttgtttgtttggttagttgtttggtgattgtttggttgttgtttcattgtcatcattttgttttatatgaaatttgtggaatctgtaatttgaaaatattatacttcctggggtggagagattgcttagtgattaagagtggtgtctgtgcttccagaggacctgggttgaagtcctagcactcatgtggcagccgacaactgtctgtaactccagcttcagggggtttgacaccctaattcagacatatatgcaggcaaaacaccaatggctataagctaaaaataagtgaatcataaaaaatttcaaaaatattattttatttagattaaatggtcatgatttgcaaatgacgctgattcatattgacttagaagtaagttatagggataatactaagtgcatagaaggaacatagaaaaaagtaggtactagaaagcaaacataattcagaatccccaccctcaaacataaataatctactggaaaggcaaacacatacagtagtcaggatgggatcaagatttgtaattgccataaagctgtgggaaaaaaaaaagcacaaaaatgcatttagcttggatcactcggagaaatttcacagaattaattctgtgcttattagaccatgttggggagactgagaaaggtgttggaagcatgtagatttcacctggaggaggagtaatgtgagaaggcaaactgaggagcccaggctcacaggtcagctgtagtggatgtgagtgacaacagttgcagctagttggctagtcaaagggaagccatcaaaacatttaaatagttaggattatgactactttttaggtttgcagcattttggagtatggattttaaaaagggagatgagagacagagtatagtttgaagcttcacccaggtataaaatgtcatacccatgatgaagaggtaaggatgggattcagacagagagaataggagtggctgaagctgccagaaccacatcctctaagcatatgtagtggtcatgtactgaattctgtttgctgtctaggcacctagtctttctacttttcttctgtgctgttggtactatttctgcaacataatatttgccaaatgggtatgggcctgcctcaggtacagtgaagtcttccctttgatcacagtcattatgaagttgtgatatttcaatgatcccatttctacgtgggttcatattaacatttgatctattctgcaaaactaaagtttatttggtcatttaggaaagctgttttatatttacaaagaatactgtaccctgctttttgattaattttcagctaagtaatttttatttcctatgagaatttttataactgacaataatgtattttcttaaccttggtagcccaacaagttctaaggtagcagagattttgtgaccatgagttaatttcctaatgtgcttattgaaaacacaggccttccatcattgaacccctcatattgtgacttttgaccattacaggtcaatcctctcagtttagttgaggtggaataatttgtttagttcctcaaattcactatgttatatatgggccatcagacgtgacatttctagttagagcactctgaataagccaccactgttgttacctgcctctttcatccaagccagtctccacttagtttgcaagtcttctgtacctttcttgaaatgttggtcaagctcttgccctgcatgtcattttcattgcaacttattctttctctggtctgataatttttaacttcatcttgcatggagattgaatgttggatgatgatctaatgaatagtaatgtctccgatgttagggactgtcattaggaatgcctacgctttgggataacttcaggagtatgtatttactaactgactatgaaaccataatgaggaaggaaggggcacagtaatcacagtagtcatgtatggagagccttattttaaagcactgccttttacactgtggaataagctattgctgtcttttaagttgatcatgtctgaagtgaatacacttaagataattactattcaccaagatgcacataagtgttcactagtacaaaagtgctacaaaatcctggtgagaagcccattaacttttctcaaaagaattctcaaggaaattgtgtgtgtgaattagatattgttgaattcactaacatccttttttatgatcatatttccatgaattatgacaaatgtactcagctgtataaccattaatacaaagaagataataaaaacttctgtatccatgctcttcatatccatttcttatgcccctgggcaggaagcatcctctgctactcacagccaacctaatctgaacctggctcacattgatgcctattccagaatattgtggaaagggaatcacacagtatgtagacatttgtgtggctttgtttgaatctagtactgttactctgagattcattcatgttgttatatctggcagtcttttctttctttggggaaaaaaaaatctctgatttatgaggaatattgccaggtaataaagaacttatatttaaagtacatactttgaggaacctttttagttatacatacacatctaatacaaacccaacagtaaagataatatgtccaacacactgaaagttcctttatgctatttcttgtgtaaacactcactcctcttcttctggttgatctactttctgtgtctaaattagcttgcctggtctaggattttatacccatgggatgctacagtattgtttgtatcttgtttctttcattctcttccctaacttcactacctttattacaagtgtcagtagttcattatttatttatttatttatttatttatttatttatttaatgttggtgaagaccatgatatcctgtgaaaatgtcacaatctgtttaatctcttactgatgaactttgtctcttgtctagtctttggctacttcaaataaaaccactataaagattcttgtacaaagtcttcgtgtgtacatatgctttgtttgtctcgtaaaattgcccagtagtagaatggtggttctgacagaacaaaacactcagtggtttccctagtgcatgcaatgttttatgttccaatgggcagaatcaaacattgagtttctttgcatccttgccagccatgggtatgggcaaccttgattttggatattctaaaagcatggggtgataccaaatgcaatcttaattttgtttctcttgtagctgatgaggctgagtcccttcatgagctgattttgaaactgaattttctgtggcagaactgttctttagattttgtgcatctttccaattttaacatttttattatttaaaaaaaataaattctattttcatctcatgagcattggtgttctgcaaacatctatgtttatatgagggtgtcagaacctttgaaattggagttacagatagttgtgagctaccatgtgggtacattgttaagctgtaacatatttgtctgtctaatatctgtctgtttatctatatatctgtctataatttgtcatctatctactcatctatcatactgtctatttctatttattatctatctatctatctatctatctatctatctatctatctatctatctatctatctatgcatatatctctatctatgtatctatctatgcatatatctctatgtatctatctatctatgcatatttctctatctatgtatcaatctctatgtatatatctatcatttatcatctatccatcctctatcacatgtctattatctttctatctatctttacatatatttaactatctttgtatgtatgtatgtatgtatgtatgtatgtatctttctggatgtatgtatctatccatctttgtgtgtgtgtgtgtgtgtgtgtatatatatatcatctatcaatctatcatttagctatctatatcaatctatgcatctatctatctctctgtatacacatatgtatgtattatctatctacctatcatctagccatctactatcatataatatgtatatgtataatatgtatatataatatgtataatatatatgcttgtctatcatctatctatctatctatctatctatctacctatctatctattcatctgtcatctatcaatctgtcatctacctattcatgtatcgatcttatagatatgccatttataactagaacctttgaaggtacttgctacaaataaaagaaggctgattataaagacctttgtctgtcatcctatagagtcttgttttagtgagtagtgatacagaaacacatcaatagaacagtattgatcacagtaattgtgcttgaaactttacagatgtcttaaaaatgcagtcaatattaaagaggtttttaatccattacttttctctctcttagtctgtcttgtctgtctgttttttctttctctatctctgtctctctgtctctctgtctctctgtctctttctgtctctctgtctctctctgtatctctctctctgtctctctctctttctctttctctctctctctctctctctctctctctctgtgtgtgtgtgtgtgtgtgtgtgtgtgtatgtgtgcatgggtgagtgtgtgtacttgtgtgtaaacatttaacatggcttaagctgtccattgtcaaggaggtacacttctgtatttggaaaatgaaaattcacattaaagagtgtctagaaaaccaaaatgtgcacagtaccaagcccagtgtaagggaatgacagggctggaaggcaggagtgggtgggtaggtaggggagcagcctcaaagagacagggagagaaggataggataggaggtttccagaggggaggacctagagaggggataatatttgaaatgtaaataaataaagaaaatgttcaataagaaaaaaaaaagaaaaatgtagaagagggactattgtagaagaaaaagtctaaagggtgcaaagaagatttgggaacaaaagcggatgatagaaaagataaagcaaaagtattgcatattttctctcatgcataatcaacaaaccaagtgaaaaagaggatagaaggagaaagatgaagttgagaaggagggaaggaaagggagtctatgtgtatctgtgtgtaacttataaatgcagaagcaagactatatgtgagggagaaggggaccagtttgggagagagacaggggcaggtcacacaggagtgaatatgagtgagatacaatgatgcacgtgtatgaaaatgtcataatgaaacttattagtttgaatgttatataaaatgttaaaacaaaacaaaacaacaataaaaacaagacccaaattccagagatattctaaacagtgtgaattttttgttgttctttattgacgtgaattatgaacgtgaagttaagcaacagcatgaccagatggtttgatttttagaccatcatctgtataagcatccctcagggagtttgaaaggttctctctttcaaacaatatttcttcaatatattttgttgatatttttctgctcagcgtcctgatttctttatccgtattgggtccatggacaatttgtacctcaggtggctgatgtcacaaacattaaaaagaatatgcagtttagaaaccagcatttctcctgtttttctccctcttgcttctttccctccattcctcttctcttttctttctcctacttgaaagttttgaaggcttcttatttgatactttgtttttcttcacatttttcatagattcttttcatagtaaagtaagagggaggtcataatccagagtacatgaaataaccactctcaagtgtaggacttactcatagcaaaatatcttatctaggttgggcagatggctcagtatcagagcactgactgctcttccagaggacctgagttccattgccagcacccacatggcagctcacaggcacctctaactctagatccaatgggtcagatacccctatttggcttctcaggacacaaggcacacagtggtgattagacatacatgcagacaaaataacaatacccacaaaataaaagaacatttttactaagaatataaacatagactaatcattaattatgtacagatatctctttatgtaagcacatattttctattatccacaccatttgtaatatcatacctgtgttaaatctgatcatggattaaattcatattacacagatggcttaggaccttttagagactggaatcaagtagaattgacttagcttgtatggctctgtgaacaacagctagcttacctgggcattgctttacccagggcacagtgtgctgagattccctgggcataaagagcacctagtatgtctgtatcaatgaaacacactcaacaaatattgagactgtttgctatcttgactccttatattaagttagtatgcccatgtttgtatccttatttccattgacatgataaacaaaaatactactgtaattagcaactactacgactattttctgtgagtcatgcagtaaatccaacccatatgagtctgcatgtaatcattgtgccaagtttatatggaataaataattactacttccattttacaaatgaagaggtacaaatgaggtaaaaacaggttcagttgctatttgagacctcatggccagtattagtactaacatgaatgaaggcccatcagctccagggctcacaaagattatctgacaattttaaaacctaagatgatctaaactgttgatttcctctcacttttgtacggtgccttttaaaactgagaatgaaataagctcaacttaccttcttactctttgtgtttatcaagctttatctaaaatatgaatggtttttactgtctcatttgaatatatgttaattttctatctctccctttaaataggtttgtttgttttagacaggatcctgctatcccaggatttatagcagtccacaatttacctccctcaacttccccagagctgggatttatggtaggatcatccatgcctggatttgtttcatttataaacaaaattatgccagactgacttctgaaatatgttaacatggactgaaaaacaccacatttaatcttttaatagaaaggaatttattatatcaaaaataaaaatcatactagttgtatgcttgatgaaattatatctggtgcttacagcattaaaacttgtctattattagttttacacaatgagtagacacatcctgaatattcatttaattataaatgtgtacacattatgattacatctacagtgatcacaatgattagttttaattttctttgattagtaattacttaatcaagaaacttcataggaaacaacttaggaagtctgtggaaagctgattcattttctgcaattgggtagccaacaacttttcagacaaagaatcaagctacctgaaagtactgtcattatgaggacattgaaggaaaaatgttaatgtctgaatatgcagtgaacaaacaagggttacaaaattttgttttttttttttttttaatcaggcagaggatggcataaattcatctcttcatgttctggactcttgaggttcatggtcaaggccacagtgggtttaatttttctgttttccaaggcaccagtcctggtcttcaagataactgactgcctttgctttatgtcttcacaagttgtctctagacctatgtcctaatcttttctgaagataatagaacccacacctactactgctttttatcttactaacctctttaaagggactaccttcaaagacaaccattgtctagggaaagggttaggacttccccatatgaatgttgcccactcccacctttaggtcacacaagacagaagaagctctcccttgtaactgcaggataaccacaaagtgggctactcttagtacttcagatatttcaacacttcattggctatacacacttaattgttttagagtataaattaaatcaacctaatttaaatatttaaaacccaaaccagttaccttgtcctccagatggatggatttgtgcgcctttatcccctccaagatctatgtctctcctactgcttgcatcacaccctcctttttgaaaatttcctctgaccaggtcagtgagcaaaatgaatttagcttaaggatgacatccagtgtcaattattaggctataaaataaagaccctccagttagtgacccacttatatctgctatctttacctaaactatttctacaggttgctacttttgtataataactcttctgcaagatggcctttgtgtaaagggtgcagtgtttaatcaatggttggcagaaggaagtagtagctgtagtaggtgtctttgtgtcattaaccagaaagcaaaccaaatgccaaagcaagcctgaacaggctacatctattcttgagaaacattttaaatgtatctttctttcaggcccctggtccttagataggctttagtcatctccttaacctaaagtgatgtgcttatataaaatttgttgaattgaggaatgcaaagactggtaaactatgtcactcttgagttaatgaaaagtagacacacagcagaccatcatttgtgtcaggagaagagtcaagataattttgtcattatgtttcaaagagtagaatttctaggttctactgagattcctatatccagccaatgttaatttgttaagatttaagagtaatttgtaatataatataaatagttcagttttatgagttggtaagaatattatgccatcattcaaacagggagagaggtatttaggaacgtgatgtcaaagttgagtttagaaactcaagaccaattttaaatatgaacatatttttgtcttatgaattgctaaaaatgtagtactaatcaaaaggaactaaagaattaaggatgtgaatgaagagttgagtctagaaagaatgcattgttcttgctttgataattgatttttgtaggcatttactatatacccccaaaatgtaacatcaatccattcctgaagtggttggtttttattatcatgatccatattttggttgtctatacatttcaccttcatttctcaggcattttttttcttttttaaattattctttaatcttttttgttatagtccagtcattatctcctttacagtctgccttctgactgttcctcatcccattcctcctttccctgtctccaataggatgactccaatgacctctatcccaccagacctccctactccccgaggctcaagtatctcgagtgttagatgctttttctaccattgagtccagaccagatagtcctctgttgtatatatgacaagagcctcagaccagctagtgtatgctgcctggttggaggttcagtttctgagagatcttggtggtctatattagttgagacttccagtcttcttatggggttaccctcctcctcagcttcttccagattttccataattccccagtatctctgcgttctatccattggttgggtgtaaatatttgcatctgactctttcagctgcttgttgggcatctgggagggtagccatactaggttcctgtctgtaagcacaccttagcatcagtaatactatcatgccttggaacctcaccttgagctggatttcaatttgggcggatcactgaaccctctttccttctgtctcttctccatttttgtcccttgcagttcttttaatcaggactaattatgggtcagagtttttgactgttggatggcagccctatcccttcacttgataccctgtcttactattggagatggactctacaagttccctctcttcactgtaggcatttcatctaaggtccctccttttgaaacctgagcatccctcacacccaggtctctgatatatcctaaaggatttccctacctcctacctcccaaggttgccagtttccattctttgtgctgatcctcagggcttcactcctatttccttccccaccccaatatctgatgatgctacccatttccactccagtatcctcttccacctaagtcccacccgaccctgccctgcccccatgtgattgccttcttcttcctcataattgggattgaagcatcctcacttgggcccttcagtttgttaaccttcttgagttctgtggattgtatcttgggtattttctacatttttggctaatatccacttattagtgagtacatatcatgcatgtctttttgggtctgagttaccttactcaggatgatattttctagttctacccatttgcttgcaaaactcatgatgtcctcgttcttaatagctgagtagcgttccatttgtgtaaatgaaccatattttctgtatccattctctttcatgggacatctgggttgtttccagattctagctatcacaaataaggccactatgaacatagtagaacatgtgcccctgtagcgtgtggggcatcttttggatatatgcccaaaaatggaacagctttgtcttcaggtttatctatttccaattttctgatgaacattcagattgatttccaaagtggttgagcagtttgcaatcccaccagcaatggagtgttcttccttcttcacatcctaaccaacatgtgctattgcctaatcttcaggcatttctttatttctgcccaaaatcatgttcttcactgggttctttctttaactccccaacccattttccttaacttcccatctgtaccattttccatttagtgtgtactgagcacagaccttgatgctaagaaaggaagtaggagtataccattccaagacagttaccttgcagttcatagtgatactggtgtgaacacacctatcttaattcagtgcatgatttaaaaaacaaaacactcagtaaagaaccacaaatttttaaggaatttaagctgttctgataatccatcattcatatcatcccagtataatttttttatattaatctgatgctgcttttatagtctctcctgagcttttgaaccaggaagtatattcagaaaaattccttcagcaggctgtaatgcatagtcattaagcagcttttatttgtcaaggtgtgtcagcagtaaatattttcttgctgggacacctacattatagtcaaggtgtgaaatttaataatattctggtaaggcaaaagggacaatgtgtccactttccaactctcatttagtagagggtagaaggctggccctatacagaagagtagatgggaggagaatgattgactgtgttctagggaacttcctggttgataaaatccatatcatacttagtttactccttgaggatattagagtaaaaacaccataatgccttttcccaggataatgggagaaagaagcagaatggattgtcataatatgagccaacaaccactttaaacatgtttcatattactatataaatgattatattttaatttttaaaattaatttttatgtgtatgggtagttaagctagatgtatctctatggactatgcatatgactagttcccatgaaggccataagagggcattgaatccacagaagttatagacagttgtgagctaccatgtggttgctgtgaatagggacttacttcttgaaaataggccagtatacttagctactgagtcagttcaccaactccaagtgatgattttgaaaattaaaagcttgatatcactggctattgtctcttgttagaattattaataatactattgataatttatttttaatttaattaaatttaacttaattattctctgtaccatagattagggaaccaatgaactcacattctgggcaggcactcaaccattaaactataatcctaactccttcctctgtttttgttttaaaagtatacaaatgattttcagtttttggtgatcactaggtgagttttcatgctgatcatgtagctagcattcaactggattctcaactattagaataaaggtatataaaactgaacattttttcatactcagtatatctcctgaaatatattgggttacttgacttgataagcagttattgtgtgaatacatagtttaataaaataggctaaaagtttaaagtacacatttttttttcataggtaatggaagggtataataataaaatattgagaataatgaaatatagtagttcaatgataataaacatgcatgttcaatagcacataaaatagcttctagtttaataatccatgagagtttgtaccttttaagtgagcagttcttttacaaagtatgctctctaggtaaggtttgaacaagaatgaaagcagacatgtttattatatcattaataacagaagaaattgacaaaccacagcaatgcctatcagtggtcggatgaggaaaatatttctgtatggacatacaatggagtaaagtcttgcagcaagaagaaatgaattagaagtacactcaccaacactgttgaagctcataaaaaatcatgtaaaaagaacagaccacaaaatgttgtattgagtaagtttgatgagtatgaccccttttatataatttaaaaagctagaaaagagagatgctttgtttatacagttaatccatattatacatgctatttattcactattaaatttactatttacattctatttagtgtgtgtgtctgtgagtatgtgcacacatctatgattgtatacatgtgaagctagaagaaaactttctttccttaagccatctgggacctgtcagaggaactcaattctttttttttttttaatatttttattaggtattttcctcatttacatttccaatgctatcccaaaagtcccccataccctcccccccccccacgctcctacccacccactctcacgttttggccctggcatcccccggtactggggcatataaagtttgcaagtccaatgggcctctctttccgttgatggctgacaaggccatcttttgatacatatgcagctagagtcaagagctccggggtactggttagtttataatgttccacctatagggttgcagatccctttagctccttggatactttctctagctcctccattggagggcctgtgatccatccaatagctgactgtgagcattcacttctgtgtttgctaggccccggcatagtctcacaagaaacagctatatctgggtcctttcagcaaaattgtgctagtgtatgcaatggtgtcagtgtttggaagctgattatgggatggatccccggatatggcagtctctagatggtccatcctttcatctcagctccaaactttgtctctgtaactccttccatgggtgttttgttcccaattctaagaaggggcaaagtgtccacactttggtcttcgttcttcttgagtttcatgcgtttagcaaattgtatcttgcactcaattcttaaaggcgagtttccttacctgatgacttatcttgtcttcctgttttataaagggaagagaaaatacaagccagcatgatggttcagtggataaaagtactttccatttgtcataaaagcctggtgtcctgagtttgtggtttatcaactgtgtaaaattccaaggtgataaataccaaaacagacaccactactcacagcacatgtggccatatatagttataataaataatatagatagatgatagatagatagatagatagatagatagatagatagatagatagatagagaattattaagcagctagagaggtagcctagaggttttaagagtgcttgttctttcagagaatcagaactaagtttcatggatccaagttaggtagctcacaaaccagctatagggaatgttcagttatttctggccattgcagatacttaaatctatgtttgtgtgtgtgcaagtgcataatgcatgctgtaacacatacacaaatccattcatgtaactaaaaatgaagtacaaaattaaaaagtaagaataggaataatgctaagaacttgatattaatgcggcatgtttttatccatacctggcatacatatgtaactggagaaagggaaaaatttaggctctcattgtgtaggctttctttgtttgcgtaaagctacttggtgttttatttattatgtaacatatgtagttttccatgtttatgtgttttacagtaaaatgttaataaagtatttattaggatataataccttttaatgcccttatgctcatggagatttcagtgaaggtaaatcccaagttagtagctgcaattactcaggcttattgactgagcagtccatattgtctgaaggctattgacaaattatctgatcagattcaggtaggcaggagcttcacctagaaaatgcaaactgggatgccatctaaatgaaaaattggaagtcagtatgggaacaaagaagaggggaagatgatccctgctatgcccatggccttctggtgcataacaggagtagttttgtagatcaaaccaaggaaagccagccaggagagctgtgcaaaacacaaaaagaaatgttctgaacatcactaactgagagatagcaaaggtgaaaatgccaatctttcagataatattctggttctgccttcctggagactgaccacaagctactgtgatagtgtaagaagggatattgtatgagcagattctatttacttggttagaaagaaaggcctagacacagtggttttaacatccaggcagcatgatgagaatacagatgaaggtgctgttagagaagccaaaaaggagactgggagctgggaaaaatgacaggaatttggtagtgaaatagatacaatggatgtgaaaatattcctcaggagtggtatttgggccacagtgatgactcactacatagaggtgctgtcactaatcttgagtccacttatcagaaccagcatggtgaaaggagagtactgtctctgaaaatggccctctgactttcatatgtacactgggtggacacacatgcccattcaaatgccaaggtgacagctttcaaagagaatggaaataggaagatcagaaggcaaatgtcttgactgtgtacattgtctgttagattcatagagtgaacatttatacatttcagacttttgagagcacacattgactatgtatttacaaattttgcttcagtcaataaatttccatccatctacccaccattgagggtggggccatttgtgggcttgtattctggtgtaggctgaacaaacaatgaagtgcataccagtaagtagcacttctccatgacttctgcatcagctcctacctaacagttaataccctgcttgagtttctatcctgatttccttcagtgacacattgctacctagggttgtaagcaaaataaaaaatttcttccctaatgtgctttgggtcgtggtgttttgccatagcagtaaaacaattcttcagtcatattcctctacaggattcaccctatatgaaaaacctaattgcatctaaaagtgatagctagttgatattttcaccaagtactttgcaaataaaaatcctacaacattgctttattcttgcttttggccttcatttgttcattttttttatgcccccatggcttgaaggcttggtgtatgctagtatattcttccacgtagctatatttccaatccccaagaacaccaacttaagttaagatcttacatactctgccattcgatatcccttagttgagaattctttgtttagctctgtgccccattttttaatggggttatttggttctctggagtccatcttcttgagttctttatatatattggatattagtcccctatctgatttaggattggtaaagatcttttcccaatctgttggtggcctttttgtcttattgacaatgtcttttgctttacagaagttttgcaattttatgaggtcctatttgtcaatactcgaactcacagcacaagctactgctgttctattcagaaaaatttcccctgtacctatattgtcgaggcttttcctcactttctcctccataagtttaagtgtctctggttttatgtggagttctttgatccacttagacttggccttagtacaagaagattaggatggatcaattcacattcttctacatgaaaactgccagttgtgccagcaccatttgttgaaaatgctgtcttttttccactggatggttttggcaacctgtccaagatcaagtgaccataggtgtgtgggttcatttctgggtcttcaattctattcaatgggtctacctgtctgtagctatatcattaccatgcagtttttatgacaattgctctgtagtacaggtttaggtcaggcatggtgattccaccagaggttcttttatcactgagaagagtttttactatccttggtcttttgttattccagatgaatttgcaaattgccctgtctaattcgttgaagaattgagttggaattttgatggggattgcattgaatctgtagattgctttctttcggcaagatagccatttttattatactgatcctgccaatccatgagcatgtaaggtctttgcatctaccgagatcttctttgatttctttcttcatagacttgaagttcttatcctacagatctttcacttccttagttagagtcccaccaaggtattttatatcatttgtgactattgagaagggtgttgtttccctaatttatttctcaacctgtttatcctttttgtagagaaaggccattgatttgtttgagttaattttatatccagctactgcactgaagctgtttatcagatttaggagttctctggtggaatatgtagggtcacttatatacagtttcatatcatctacaaatagttttgctgtctaattgctctggctaggacttcaagtactatattgaataggtagggagaaagtgggcagcctcattgagtccctgattttagtggggttgcttccagcttctctacatttactttgatgttggctactgttttgatttagattgtttttatgatgtttaggtatgggccttgaattcctaattttccaagacctttatcataaaggggtattggattttgccaaatgctttctcagcatctaaaagattcaacatccttaatcatcagagaaatacaaatcaaaacaaccctcagattccacctcacaccagtcagaatggctaagattaaaaagtcatgtgacaacagatgctggcgaggatgtggagaaagatgaacactcctccattgttggtggaattgcaagcttgtacaaccactctggaaatcagtctggtggttcctcagaaaattggacatagtattaatgaaagatccagcaatacctctcctgagcatatatgcagaagatattacaactggtaagaaggacacatgctccactatgttcatagaaaccttatttataatagccagaagctggaaagaacccagatgtccctcaacagaggaaaggatacagaaaatatggttcttttacacagtggagtactactcagctattaaaaagaatgaatttatgaaattactaggcaaatggatggatctggagggtatcatcctgagtgaggtaacccaatcacaaaagaattcacaagacatgcactcactgatatgtggatattagcccaggaacttagaatacccaagatacaatttacaaaacacatgaaactcaaaaagatcgtagaccaacgtgtggacacttcgccccttcatagaactgggaacaatacacccatggaagaagttatagagacaaagtttggagctgagatgaaaggatggaccatccagagactgccccacccagcgggtccaatcccataatcagccaccaaacacagacactattgcttacaccagcaagattttgctgaaaagacactgatagagctgtctcttgtgaggctatgccagtgcctggcaaacacagaagtgagtgctcacagtcagctattggatggaacacaggtccccagtgtaggagctagagaaagtacccaagagctgaaggggtctgcaaccttataggtggaaaaacgatatgaactaatcagttcccccagatctcatgtctctagctgcatatgtagcagaagatggcctacttggccatcattgaaaagagaggcccctaggtcttgcaaaccttatatgcaccaatacaggggaacaccagggccaagcagttggaatgggtgggtaggggagcagggaggggggagtgtatagaggaccttcaggaaagcatttgaaatgtaaatgaagaaattacgtaataaaaaattgggaaaaaaagatcgtacatactttttacagacaaattttctttctttctttctttctctctctctctctctctctctctctctctctctctctctctctctctctttccttcctttctttttccttccttccttccttcctttctttctttccttttttttttttttttttttgagacatggtttttctgtgtagctctggctgacctggaattcactctctagaccaggctggctttgagctcagaaatccacctgcctttgcctcccaagcgctggggttaaaggcgtgctccaccattgctcggcatacagacaaattttctaaggtcattgcttgaaaccaacatatcttgaagtcatttgttatataatagataactagtaaaatgaagacagaatttcaaataaaaaagatgatttaattttctattattacccactttcaaaatacactgggaaattttagaaaagtttaatatataattttcatgtggtaataataccatcaactctaatattaattagccagaatccaagtaagtgtatatataaatatggtcttataaattttgaaagcttagttagtatacaatcatatttcatttaaaatagaattcagttattaaagaggaaaggataataaaaccattcacctacataactaatgttttaggaataattataaaaatgccacagtgattgaaagcaaacacaggctttcaaacatgtcagtcaaatgttaattatatagatattgggcttcattttcctgctcaatatgaaactcaatgcaaattaaatttataaatttataaaataagtgtaaggacacataagaaaatttctgtcttctcaaaaagtctttttccccccaaaataagtactgtctcaaagagataaactgatacttcattaaaatgatggattttcttcatggaatgtcaccataaaataatcaatgacattctcaaggatggaaaaaagcatgtgtactgtctgtgaccaaaacctgcaaattgctttgagtcaccaagcaagatagtcaaccaaccaaaaggtgtgacagctatttaattgaaatacaactagccaaaaccacttgtaagcatcttggactaatttgtatacataagacaaagtcagcaataattactgatattcatcatacttaagcattgagtatgggagtttacagaggaacatgcctaatagattccacgttcaatgataagaggtataaagtggattggttttatatatgatccatgtggctggacagtcacacaatggcctgggagtctgagaacaaagaagatggaaggctggaagaggggctggctaggctgaaagcggaaaatctaagagctgttgctgtatctgtattcaggagcttcgaaatctagtatatggttgggatgctgtgcttttaaacaaaagatagcttctatactatgacaaagacaaagtcttaattaaaagttgacattgtgtgtctattctacctagatcattctattcagttgagagtgagccttgctctggttttgggcagttcctatcaacatatctttgtcaagttggttagctgacaggtatcacacacacacacacacacacacacacacacacacacacacacacatacacacacacacacacacacaattatgcaacacagcaaactaagtacacacataagtatgcaagcagtgaaccatgcacatttaaggaaggagtcttccttggtatctgatttcttctcccaaggatctgttttctttaaccagaaccctgatctcaaacaatttatttattcactctgcccccttattaacattaaagctgcaccaaattgcttccaaatagtgttacattgtttatatgtggagtaattctttatttgctcatttgttgatgggcagctaggttagttccaatcctgcctattgtgcatagctccttaataataaacatgtaattaatgtaggtatctctccagtgcactggtttacttctcctaactacttgtttgaagtgggataagctgggtcacgtgtgcatctacttttcagagtttgtggggaaaaatctccctgttctctacagtggctgtaaacattttcattcctatcagcagtgtataataagtccaatgattgtattctgcatcctttccagagtgttttttgtttgtttgtttgtttgtttttccttcttgaaaatttgtttcttattataataagcatggcttttatttcagcaacttgttgtaatcagattttttccataggtatattacgttttcaaatataaaattatatagaaataattacagaagaaatcacactgccctcttgtaattcttccattctgtaacccactcatttgtttaatttagcgactctgaaaatgattggcagtggagtacagccataaatatcttaacaattaaatatattaaatatgtaaatagcgatatatatccttattctttctttctcagataggagttattctgggcatccattcttcattttgggttttctcagtttatttaaaactcctcgaattatgcataccagttcacaggcactgtcactcttcttcctgaggtttcataattctgtatacgtgtagatatcatgatgcactcaatcaccatgccagattcagatgcttatagagtttcaataatgaatcatttaaaaagtaatcctttctgaggccagtgaggtgacccagagtgcccatgctcttgccattcataccttatcatttgtgatggatatttgaaatctgcaatagaaggagagaattgatgactaaagttgtcctgtttctcacatacatgcagccctgtggtatgtgtgcatcctccacaatgatgatgatgatgatgatgatgatgatgatgatataattctgtcctcttctccaggctggttttgagtactcaattctcttgtgctagccttttgagtgctgacattacaatgtgacacactgtgcctggtttttacgaatttcatatagtctctctctgtctctctctctgtctctctctctctctctctctgtgtttgtgtatattcatgtatgcatatttgtgtgtatattttaaagatttatttcgtttttaacaatgtgtatttatctgtgtggagatatgtacatgatgtgtgtatgggtgtcatcttaagccagggcaggagttctgatcacttagagctatagtcattaggtagttgtgagacatctgatgtgctatgaacttaactgacctcctgcaggaggagtcccagctgttaacctctgagcaatcattctggaaaaggtaagcatatatttttgatgaaaattggacctgaaagtagtatttcttatttatttcttatttatttatttattttaaaatttattttattttaattaggtattttcttcatttacatttctaatgctaccccaaaagtcccccataccctccctccacattcccataccccccaactcccacttcttggccttggcgttcccctgtactgagacatataaagtttgcaagaccaatgagcctctctttccactgaaggccaactaggccatcttctgatacatatgcacgtagagacacgagctccgaggggtactggttagttcacattgttgttccatctatacctttgcagaccactttagttccttgggtactttctctagctcctccactgggggactctgatccatccaatagctgactgtgagcatccacttctgtgtttgctaggccccagcatagcctcacaagagacggctatatctgggtcctttcagcaaaatcttgctagtgtgtacaatggtgttagcttttgaaggctgattatgggaagcatcacaaggtatggcagtctctagatggcccatccttttgtctcagctccaaacagtgtctctgtaacttcttccatgggtgttttgttcccaattctaagaaggggcaaagtgtccacactttgttcttcattcttcttcagttacatgtgttttgcaaattgtatcttgtatcttgggtattctaagtttctgggctaatatcgaattatcagtgagtacatatcatgtgagttcttttgtgattgggttacctcactcaggatgatgcccttcaggtccatccatttgcctaggaatttcataaattcattctttttaatagctgattagtactccattatgtaaaagaactacattttctgtatcaattcctcattgggggcatctgggttctttccagcctctggctattacaaataaggctgctatgaacatagtttagcacatgtccttcttactggttggaatgtcttctggatatatgcccaggagcagtattgcgggatcctcaagtagtactatgtccaattttctgaggaaccaccagactgatttccagagtggttgtacaagcttgcaattccaccaacaatggaggagtgttcctctttctccacaccctcgccagtatctgctgtcacctgaaattttgatcttagccattctggcaggtgtgaggtggaatctcagggttgttttgatttgcatttccctgatgactaaggatgctgaatattttctcaggtgcttatcagccatttgttattcttcaggtgagaattctttgtttagatctgagccccatttttaaatggggttatttgattttctggagtccgccttcttgagttctttatatatgttggatattagtcccctatctgatttaggataggtaaagatcctttcccaatcttttggtgccctttttatcttattgagagtgtcttttgccttacagaagctttgcacttttatgaggtcccatttgtcaattctcgatcttatagcacagagccattgctgttctattcaggaatttttcccctgtgcccatatctttgatgatttttccccactttctcctctataagcttcactgtctctggttttatgtggagttccttgatccacctaaatttaaccttagtacaaggagataggaatggatcaatttgcattcttctacatgataacctctagttgtgtcagcacaatttgttgaaaatgctgtcttttttccactggatggttttagctcccttgtcaaaaatcaagtgataataggtgtgtgggttaatttctgggtcttcacttctattctattagtctgcttgtctgttgctataccagtaccattcagtttttatcacaattgctctatagtacagctttaggtcaggcatgctgcttccaacagaggttcttttatccttgagaagagtttttgctatcctaagttttttgttattccacatgaatttacagatttccctttctaattccttgaagaattgagttggaattttgtggggattgcattgaatctatagattgctattggtagcacagccatttttactatattgatcctgcccatccatgagcatgggagatctttcaatcttctgtgatctttaatttctttcttcagagacttgaagttcttatcatacagatctttcacttccttagttagagtcacaccaaggtatttatattatttgtgactattgagaagagtgttgtttccctaatttctctctcatcctgtttatcctttctgtagagaaaggccattgagttgttttagttaattttatatccagctaattcactgatgctgtttatcaagtttaggagttctctggtggaatttttagggtcactcatatatactatcatatcatctccaaaaagtgatattttgacttcttcctttccaatttgtatcccctttatctccttttttgtctaattgctgtggctaggacttcaagtacaatgttgaataggtagggagagagtggacagccttgtctagtccctgattttattgggattgctttcaaattttcaccatttactttgatgttggctactggtttcctatagattgcttttatcatgtgtaggtatgggccttgacttcctgatcttttcaagacttttatcatgaatgggtgttggattttgtcaaagctttatccgcatctaacgagatgatcatgtggtctttgagtttgtttatgtaatggattacgttgatggatttccaatattaaaccatctctgcatccctggaatgaaacctacttggttcgggtgaatgactgttttgatgtgttcttagtttcggttagcaagcattttattgagtatttttgcatcaatattcataaggtaaatcggtctgaagttctctatctttgttgggtctttctgtggtttaggaagcagagtaattttggcttcatagaatgaattctgtagggaccttttgctactattttgtggaatagtttgtgaggaactgggattagagcttctttgaaggtctgataaaactctgcactaaaccattctggtcctggggttttttttggttgggagaatattaatgactgcttctatttctttagtggatataggactgtttagatcattaacctgatccttatttaaatttggtacctggtatctgtctagaaatttgtccatttaatccaggttttccagttttgttgagtataacattttgtagaaggatctgatggtcttttggatttcttcaggatctgttgttatgtctcccttttcatttctgattttgttaattgggatgctttccctgtgccctctggtgagtctggctaagggtttatctatcttgttgatttcctcaaagaacctgctactcatttggttgattctttgaatagttcttcttgtttccacttggtttatttcacccctgagtttgattatttcctgccttctactcctattgtataattttgcttccttttgttctagagcttttaggtgtgttgtcaagctgctagtgtgtgctctctctaattcatttttggaggcactcagagctatgagttttcctcttagaaatgctttctttgtgtcccataagtttgagtatgttgtggcttcactttcattaaactctaaaaagtctttaatttctttctttattcctttcttgaccaaggtatcattgaaaagagtgttgttcagtttccacatgaatgttggctttctattatttatgttgttactgaatatcagacttagtctatggtgatctgataggatgcatgggacaatttgcatgtttttgtatctgttgaggcctgttttgtgaccaatatggtcaatttttcagaaggtaccatatggtgctgagaaggtatatccttttgttttaggataaaatgttctatatatgtctgttgagtccatttgtttcataacttctgttagttttactgtgtccctgtttagtttctgtttccataatctctccattgagcaaagtgttgtgttgaactctcccactattattgtgtaagatacaatgtgtgctttgagcttctctaaagtctctttaatgaatgtggctgcccttgcatttggagcatagatatttagaattgtgagttcctcttggaggattttacctttgatgagtatgaagtgcccctccttgtcttttttgataactttgggttggaagtcgattttattcgatattagaatggctactccagcttgtttcttcagaccattttcttggaaattattttccagcctttcactctgaagtagcgtctgtctttttccctgggatgggtttcctctaagcagcaaattcttgggtcctgtttgtgtagccagtctgttaatctatgtcttttttgggggggaattgagtccacttatattaagagatattaaggaaaagtaattgttgcttcctattatttttgttattagagttggcattctgttattttggctgtcttcttttaggtttgttgaaggattactttcttgctttctctaggatgtggtttctgtccttgtaatttttttttctgttattatcctttgaagggctggaatcgttgaaagataatgtgtgaatttgtttttgtcatggaatactttggtttctccatctgtggtaattgaaagtttggctgtgtataatatcctgggctggcatttatattctcttagtgtctgtataacatctgtccaggatcttctggctttcatagtctctggtgaaaaatctgttgtaattctgataggcctgcctttatatgttacttgacctttttcccttactgcttttaatattctatctttttttagtgcatttgttgttctgattattatgtgtcggggagactttctgttctggtcccgtctatttggagttctgtaggcttcttgtatgttcatgggcatatctttctttaggtttgggaagttttgttctataattttgttgaagatatttgctggccctttaagttgaaaatctttattctcatctactcctattatctgtaagttcggtcttctcattgtgtcctgtatttcctggatgttttgagttaggatctttttgcattttgcattttctttgattgttgtactgatgttctctatggaatcttctgcacctgagattctctcttccatctctggtattctgttgctgatgcctgcatctatggttccagatttctttcctagggtttctatctccagtgttgcctcagtttggttgtcctttattgtgtctacttccctttttaggtctagtatggttttgttcatttccatcacctgtttgaatgtgttttactgttttgctttaaggacttctacctgtttggttgtgttttcctgtctttctttaaggacttgtaactctttagcagtgttctcctgtatttctttaagtgagttattaaagtccttcttgatgtcctttaccatcatcatgagatacgcttttaaatccatgtctagcttttcctgtgtgttgggttgcccaggactggctgaggtgggagtgctggattctgatgatggtgaatggtcttggtttctgttagtaagtttctttcttttgcctttggacatcttgtaatctctggagttagttgttatagtgtctctggttagaacttgttcctcttgtgattccattagcctctatcagcagaccttgaagactagctctctcctgagtttcagtggttagagcactagctgcagccaagctctcctcttgcagggaaagtggacagaaatctggcattcagacatgcctcctggcagaagatgaaggccccaaacagggcttgtcccagaatctgtgtagattctgtagtccacactctcacctgcacagactagtcttcacaggatccgggaaccaagatggatcccccaggtgctgcggcaaaagcaatatagtatttcaaactactttataatgtattgctgcaatatccaattttcttcttcttcactgatagtaggatattggacagtgaattttcacagcaaaggagtatctttaaatattaggcttctatatcatgttccaataaaaacaatttagcttagatagttgctgtttatgaggtcatggggcttgctgtcaataacaattctttcttgatgcaaattagttcatctccttgtcatttcaactgatcattggcttacacttcctagaaaatcttcagtcccagcttatgatgcaataatgaaactgattatggttttacaaattcatgagtattagtgtccatcatcaacaaagttgcgggaacttatttcctggtacaaagcaacaagtgtgtacaaagttcacacttgtcaaaaagacttggtcagttcttgttgctttgcattcactctgctcttaactatatttgtctattgagtctatcctcttctttccatgaggcactgaaccaggacatcattgaaaaattcatgtgaactaccttctttgctcaaaattctggcttcaaacttgcagactctcagtctttgcctcccagggcttatatacaccaccaggtcccacacatttttattgtttgatttttgagactaggtatcactgtgtagccttgactatctgggaacttacaatgtaaattagactggcctagagttcaaagggattcccctttttttttttgtttctcaagtgttatgatgaaaaatgtgtgctaccatgcctagtgtcttccttaggtttctattgatgtgatgtaacaccaagaccaaaaagcaagttagggaggaaagggtttgtttgaactatacttcctcatactgttcatcatagatagggcagaaatttggaggcaggagatgacgaaaccatgggaagatgctacttgtgcctcatggcatgctcagtctgctttcttgtagaacataggatcaccagtccaagaacaacaccaccttcagtgggccgggctctcccccatcaatgtctaatttagaaaatgacttacaggtttgtctacagccaatcttctggaggcattttcttaattgaggttcccttcttcggcttgtgtcaggttgatataaaactatacagcacaattgaccccttatcaccatgacatgaacataccactgttaagtcacacttttccttttccatttatccaccaagacctcacacactaaataataaataaataaataaataaataaataagtagcttttaagaatccaaacatctttacaaatttaaacattacagcccagtcattttaaatactcatagtatcttttaaaatccaatcttttaaaattcagtctatcaattgtggcttcctataaaatctaaaatatatcagatacttttttagttcaagagggaagaacgagagatcagttacaatatttaaaaagcaaaagctaactctaaaagggattacctccaatgtttgggattaaattactctacctccaatgtttgagattaaatcgcagttttctcggctcctctaagcagcctctctgaatccgtccattgcaacacacacagcttgttttctaggctccaactggctccatccccctgttgttgctgatcttggtggtcacctcatgatactggtaactccaaaatgtttggggtcttctactacaactggtttgtacgtttacctatagcttcttatctattcttaattaaagaaaatgccttatatgtttgcttacaatctgatcttctgaatgcatttccttaattggttccctcctctcagataactttagatttcgtcaagttaacaaaactatccagtcaacctggcctgctcccatgtgttttatttagacacaaattaatgtttcagaagttgtttatagactgtaaatcttgcagcactgaatatttcttttaaagattagtgaacagctggaagcatggtgccaggccagcccaggttagaaaataagacccatctttaaactttttttaaatattcaaaacgtatcatttcataaattatcaacaatgatagctaaggacctatgtcatataggtgacaaacagtatttctgaataaaacataaagactaagtgttaatttatttgaaaccatcttgctttaataatttggtttattgttactgtattctgaaagtttttatctattttcatacactataaaatacagtgactacaacaattctctcatcaaatttagcagtaacaatttatctacaagttttaatgttaaatcatacagttttgcagagctataattattctaacaaaagtgcagttttaggtattaatcatgtaccataggatactttcttttcttttctttttctttcattttctttttttcatttgaactaatatgaaactaataaaatttattttaaaatatacaactcaatattgacttttttttctttttcaaattttttattaggtattttcttcatttacatttcaaatgctatccccaaagtcccctatacccatccccctccccacttccctacccacccactcccacttcttggccctggtgtttccctgtactggggcaggtgtttccctgtactggggcatataaagtttgcaagaccaaggggcctcttttcccagtgatggccaactaggacatcttccacaacatatgcagctagacacgagctctgggggtactggttagttcatattgttgttccacctatagggttgcagaccccttaagccccttgggtactttctctagctcctcccttgggggccctgtgttccatctgtatactttattttctaccacatacaatatatgtggcaagtaatgaattacttcataacagttcttatttttgtgatagaacacaacatatattgaatttgtatttttcaaaaatacagcatatttactgggagtggtgatgtagacctgcacttctagcacttgggaggtagaggaattaagtttaaggtcactaggcccaatagtgattttgagcttgggctactgattttgattcccaagaagcaaacaaatgaacaaacaatctaacaacatattatcattagttatagtcaccatatagaatattaacccataaaattcatatagagacttgaaaaatacatgtatacctacctgaagttttatgttttgggtgcagctacagtcaagtcagtaaagtatcccaaaattctactggatatgtcttgtatatgttttctatttgattttgttttgtaagaggctttcactatgttgccccggcatgatatggatgtgattctccttcctcagcatctggaataaaatatggaaatgagaagttgttttgagagatgccacaaacatataattcaaagaatttatggccatcattcctgtattgcagacagatttaaatctcaagcaaaattaaagagatgtacactttcaaggcatattacaaaataatgagaatggtacactgaaagatatcagaggttggttcacatgccttggtaacatttgtcagtcacccattgttgaaatagttttcagaaaattggtaacatgaaaatatttcagataattggaagatagacagtgtgactgcatccacctatgaagtggtgagatcttctgactgtctatgacaaagctgcatataaagcaagcatccccatgaatcatggcacatgaaggattgcaagaaccatctttgccatatttgattatatactgtgtatagatggaagcagtatgagagatttgaatagaaaagtaatttagaactgcaaagcaaaaattgagctactttggagttatgatctagagaaacaagtcattatcaaagttccctattatggcaatgactctaatattgagttggtatagcagcattaccttaggtactgcaaggtgttcttagaggaaactcgttagcgctcagcaactcacttcatcagtgccatgcccaaggtggtggcagtatctagccccatgcctggcctgtctttccaactgactttctgtatatctttaaaacagttgcaagtggaatttagatatatgttcagaaggataaaaatatttgagtaagacaatttaagtgtaactaattattcttattttttagtttattttttattaggtatttatttcatttacatttccagtgctatcccaaaagtnnnnnnnnnnnnnnnnnnnncccccaccccccccactccaatttcttggccctggcattctcctgtactgaggtatataaagtttgcatgaccagtgggcctctctttccactgatgtccaactaggccatcttctgatacatatgcagctagagaaacgagctccggggggtacaggttagttcatattgttgttccacctatagggttgtagatccctttagctctttggttactttctctagatcctccatttggggccctgtgatccatccaatagctgactgtgaggatccacttctgtgtttgctaggcccagcatagtctcacaagggacctgtgggtcctttcagcaaaatcttgctagtgtatgcaattgtgtcagcgtttggaagctgattatgggatggatccccggatatggcagtctctagatggtccatcctttcatctcagctccaaactttgtctatgtaactccttccatgggtgttttgttcccaattttaagaaggagcgaagtgtccacactttggtcttcgttcttcttgagtttcacgtgtttagtaaattgtatcttatatcctgggtattctaattttctgagctaatatccacttatctgatacctaaatcacagaaagatccaacaaagatagaaaacttcagaccaatttcccttatgaatatcaatgcaaaaatactcaatagaggtctcgctaactgaatccaagaacacatcaaaacaatcatccatcctgaccaagtaggtttcattccagggatccagtatggttcaatatactgaaatccatcaacgtaatccgctatataaacaaactcaaagacaaaaaccacatgttcatctcgttagatgcggagaaaacatttgacaaaatccaacacccattcatgataaaagtcttgtaaagatcaggaatccaaggcccatacctaaacatgatgaaagcaatctacagcaaaccgttagccaacatcaaagtaaatggtgggaagcttgaagcaatctcactaaaatcaagtgggagtagacaaggctgcccacactctccctacctattcaacattgtacttgaagtcctagccagagcaattccacaacaaaaggagatcaaggggttacaaatggaaaggaagaagtcaaaactaattattcttaaattaattgaacctctcaccttgttctaattaaaacacagtagaacaatatagtggatagcccccatttattgtgtgataacaatttttgatgattctccatattcatttctatagtggctgtgctaatttacattcccaattacaatgcacaagtgcttccttttcttcacattctggtcaatggttcctttatatccttttgaggtggtactttactgtggttttaatttaaatttcctggatgattagcaatgttggaattttttatgcctaaattcatatacctattgatcatttttatttctttacagcaatatctatacaggtcctttgtccattttttaaattagtttattgcatttttgaacttctgatctagatttgacaatgtttctttctaagatgtttatagttacattgtgtgctcccacactataggcttttgtcttctctgaagttgtttcctttatgttactggatgaagccttctgagtagatatagtccaaattgcttaattttggcttttgttaccttaattttgctattctgtcatttcctaaaattgttatccagacttgtactatgaagctttattttccttttcccaaataaacctaatagattcataacttcagatcttatgtttatgcctatcatccagattaagtgaatatatcatatgagacgaggagttaatttctttcttctgtatatgaatatctaggcttcccaggactaattattttactgaagaaaccatcatttcttcaagtgccttcagggcatctttgtaaaaaaatttaatatattccaactgtatagactaatttctgggttccatgcattcttctgctgaatatgtctctttattcaggccaattcagttttgagtatggtggctatatattaaacgttgaaatcattttagatgattctcttcaatttgcttgttttgagacacgtctcttacatcagtcggtggttctgaagaattacaacttgcactgtagctgtgttctgtttatctgaagcagaattacaggctcatctctaccccaacttcccaaaacaggaaagcattgctttcctaccctttgctacacattgtcagagggtccaggcccacaagtagcagtcttcactcctgatcacatctcactaaggaaaatgttgtaagagcagctctatctcaaaatgcttattgtccccgttgtggcggaagggagctgctgactatctttacgaaggtggtgtaatataagtttaaagcaatcctgcagttatgtactaaattacaaaatatatatcactacagagtagatattcagtgttggtataatcccattacctgtatttatgccagtgctattaatagcacaacacaacagccagtcattttaattttaaagtttacagagcaccaggatgacttttgtgttttctgttttttagccttcacagaaccccaagtagtatagatgtattttcttcactttctaggtcctatcataattttacaaaggatagagatttaaagagataatatttggggaaatttcctagcacttctttttaagaaagcctgagcactttaccagccagtgacacaaacaggaatttcaatgtgggcaatggatgtttactttccatttcagtgagaaattcttgaggcacatacccttatcattcgtttagatctttgacacataccctggtatacaatgtcatgtttataatgaactaatgaaatgatgaatgactctataagttacattttcaaagatgtgattgttcaatattacctcacagagaaataatgtcagtgttgggctttctcaacactgttgccatccctcctcttgatattcaaacactataagtcaactcctcattttagggcaggagacatctcagtgttgtttctttaaggaagcagagggaaaaaacatttggtcctcctaggattaggttctgagttggcctctattatcctgattattttttttacttcattatgtaaaataataaaaataataggtatagaatatgttttatacgctaccctattcctaaagtactagatttagtactttagtaccctattcctaaactactagatttagatatggaacataggagtcaattagggttggattgggtggaacccaacacaggaattccaacacaggaatgctgtgcctctcccaatcttcctaatactacactagtgtttcatttcgctttctttctttctttctttctttctttctttctttctttctttctttctttctttctttctttctctctctctctctctctctctctctctctcttttcttttcttttcttttttttttttttttgagacagggtttctttgtatagccctggctgtcctgtaactcactttgtagaccaggctggccttgaactcagaaatctgcctgcctctgccttcggagtgctgggattaatggcgtgcaccatcatgcccggcttacactagtgtttcttaacctgttggctgcaatgtctctggagttgaatagcatatatttacaatcgataaaaatcgtcacattacagtcttgaagtagtgaaaaaacaattttatggttgggagggtcactgcaacctgaggaactgtattaaagggtggcagttttaggaaggttgggaacaactccattacaccatatctaaccttggagagagctcattcaagaagccattgaaaaggtagatcatctgcaagtgagaaaacaactcaacaggagtgcaagcatggtagtaccttgatctcagactttaatcctctgtaatatagagagctaattaaaacatcagccctataagtccaagctgactacaatatatgcttaaataatttaattactgaatgttaaagtaacttaaataagttaattctaaaatgtttagtacatttccaagcatataataaatgcttaatatttaattgaaatttcttattattgtatgtggtaggggtatatatgacataatccacatatagcagtcataaaactgcttctagagggatttttgttttgttttgtttttctagacatggtttctctgcagccctggctgtcctggaactcactctgtagaccagactggccttgaactccgaaatctgcctgcctctgcctcccaagtgctggggttaaaggtgtgcaccaccacacccagcaaactggttctctttttcaacctttatttgggttccagcaatgaaggttgttatgccaggctgacaaagcaacatccctgatctgctaaacgatctatgcccatcccttactttttgatacaatccttctgtgtagctcagtatgctttccattgtttgaccaccacaaacagtgattgcagtcatatataactacaacatagcatgtgtgactcacacatagtgtgagtgcatggcctttttattcatagattttcctagggtcacatagtgggccatctccaaagaaaaacagcaacctaaactacttagaagcatacacacagaagcataagtgttaccatttgtttcttttagtttttaaagttgaaaaatttactcagaaatatcatcttcggaattgtactagtcacttcatactggctgtgataaagtattgtgaccaaaagcaacttaagaaaaaaaggtgttaattttaacttacagtttcaaagtggtagagttcatcatagtggggaaggcatggcatagctgcagaagcagacagctggctgatcacatgttaacctcacacaggaagcacagacatgaaagaggaagttgaacaaagctataaattctcaaactcgactcctcttccccctagtgaaatacttcctccatcaagactttacttctgggcctggcagtggtggcacatgcctttaatcccagcacttgggaggcagatgcaggtggatttctgagttcgagaccagcctgatctacagagtgagttccaggacagccaggactgcacagagaaaccctgtatcaaaaaacaaacaaacaaacaaacaaaaaaacaaaacaaaaaaaaaacaaaaaaaaaaccaaacaacaaaagactatacctttgaaaggttttgtaacctcccctaagtgtggcacccactagggaccataaacctgaaggggggtggggtattttcaatgaaacaactgtaggagatatatatacaaatgatagttcttttaaggacagtaaataaaatctattcttagtctacagacgttgaattcttagtgtacagaagatgtacaatgaactgtctatataaaaatattagcatatacaatatgctagttatctggttgattatatgtttggcaagcctctggtatatttagaagacacctacttacctattgattcaggattctactagtcatcagaagtattcagagcatagttgaaggctttgtgttatggcaatggataaggcttcagacctggtaaaacaagtttgtgttcatcagtttgcatgatgaaataaaaatgcctctgctgtgattaagaacatataaagatatgggtattaatgctctgaatccttgcttatttacttggcaccataaagtacttgccttgccaggtagctgtatttttctctatcttgaccttaaaccaaaggcgtcttgtccattggtcttttaccatacatacatttgccagctctacaaccacaaggtaaatctttataacggcatcattcacattaacgaactgatttgattcagaatgaaacagcagatagcagaaccagaattaaaactttcatttaggtatgagctatttgagatgttctgtagtaatttccacagtggcttatctattgaatgaatcttgttagaagctgtaggaaaaaccctgtgaaaagcaagtgggctacaatgaggaagaattactctttaattagaattttgcagataattaaaacaagttattcattagaattataaaattagactatactggtacagtatatacaatgaaatggtgttttaaaacatatgcatatctataaatataaacatgcacataatcattatacacatctaatacatatcatgcattagatgtgtctaatgcatatattatacatgtacatactgatcagcctttgcaatagaagacagagaaaatgtttattttgaagacaatacaatatttattatgtttaaaaactagcagtctctgagaaagagagattcctcagtatataacatgcttactgtgaaactgaggactcctgtttaactttttagcactcacaccaaaaaaaaaaaaaaaaaaatcagggtttgttggacatctgtaacctcagtgctaaaaagataagaggcagatgcctgcagttagccaaaccagactaatcagtgtcctccaggttcagtgaaagacactatatcaaacataaggtagaaagcaattgaggaagatgcctgatataaaccttttatcttagcacacatgtgagcacacatgcagaggcattcatatagtcacatgcacacacctgtgccagcatcagagatgaacctgctcactagtagatgattaatatatatgtatcttaaacttcctataggccaggatatccctgagtttgggagtatataggtagacacctacttcattagtatatagattaatgaggtaggtcaagaaattttacatccactaaggagaaaggtaaagaagaaagcaatcaagagaaagaagccactctgtacttatatttaagactccaaagttttatttacttagcatggagataatgctgtcaaaaagaaagaagctctaatagcaagcagaggttagtttgaaaaggcttcatttcctccagtgaagtaggggctaaggtgtcattatttcccctcaaacagtaatatcaagtaaacagaaactgactctgagcaaggaaaattaaaaaaacatgagctcttgggatatgggtattgtagcgtcttattgtctttgtttcctatatgcacaatacacatggtttatttttggaactgaactgacaccttgttggaacaagccataatctatgcttgtggctggcattcagggacagagtacatgtttcttcaccgctggaaatgggtcaaatataagaacacagttttcatttctggctggctttctaaataaagggcaaaaactaaagacagttaatagtccccccccctttcatgtatgttttcctactgacattttgagattgtaactatgattttggaggtagaataagggaagcagtgacttttatttcaaatgctaagggtcctaaaacaaacttttataaatgtattcaaaatacattgtaaaattctcatcaatttattttaactattcttcaaatatgcattcactgtgtatccactgaacaaaatctcccctgccctcctctctctcctgtctatctctgtctcaccatccaaaacagtgaagagtcgtataaaagatagaactccagtgaagagcttcctgcttctggggaacttacacatgtgcatttggataggattgatgcatttatgtgcatgaataacagtaaacatgcctgaagcagtgaatgactgtgtctctaagcagccaagtattcacagtgtcatgaattcctaggatgaggtttcaagttaaattggaactttctcattatgcaggaaacagctttaatttttgtgctcaataagctatataatgtatgttcatgggataaggagcctccaaaaaaaatgagtggctttgctgactgacactgggaagtaaaagcttttcaagatttgacttcttatttatttgtatttgcaaataacatgtatgctgtcttcatacatgctgctaggttctcctatgaaacacaggcaaacatatacatgcatgcatgagtgcatatgtgcagtttgttctcacaagcatttcatcataaagccacctgtccacctctcccagtgctgatgtgactgacccacaggctgattgttgtggaggcacacttgtctgtagaagagtagccacttaagtcactttccatttgtacattgtgcccaggatctgaaagaggtatttttaataatggcagttgtgttgtgaagtgactcacatgccaacaaaaaattcatattgatggcaggagaattacatagtagatcatcacctttcttagtcatgtgtgtctgtgtgtgtatatctgtgtgtttgtgtacatgtgtgtagaaaacacacacacacacacnnnnnnnnnnnnnnnnnnnnacacacacacacacacacacacacacaagacagattgacacagatcccagactggtcttgaactccgtatcttccttcttctggctcccagtactgggattatccatgcacatcactctgcttggcttttccttactcatattttataccacattatgaagcttcacagatacaaattgatacattctgtgttatgatactgtatacagaaatataacatctagaaaacattattttctaaataggagataaaaatctttttgtaaaaacctatacttaaagagtgttgggtaaaatttagtaactggtgtttatgtagttaaagaaaacatttagtaagtggtttaagggagctaattaatttctcacggacataattaatgaagacaggatctgattttgcagtgaaaaagaacagttattgttttatttcaggtctcttcatatggaaacactggtgacagaaatactgattttaattcatttcttcatgtaatccttctacaaatgcaaaccatgttaatttaaacatgcttggaaaacagataaacttgaaagctaatattaccatcccaaattaggtgaaggtgcgtaaaagacaagaaagacaaaatttcattatatatgcttcaagagggatttttcacaaactcatagccctttcaaataaaatgatgaatgtttctttgattctaattgataagtgttatatataaaagagttcttgccttcattcttatcaaaactgtggggatttccaatgataggataatattatgtgggtggcaatgtctcagaagaatagggagcttatcagtatttacttaggttctattacattcagagccataaaagcaactctactcatgaatgtacagccagtcaaggatattgcctcttccccccaaagaggcttgatattaaaggagtgcagtgaataagctcaaatcatgaagtatttccaacaatggaacagttttccttcaaattccacattgtagacaatattttatgaagaatcactggctgtcctttaagtttgagaggtaagagtaataaaaattgtgataaggattattaattttcttacaaattttattccattttgtttttattattaaaacacttcatgataatatctaccttcaatgagttctgactgtaggttaatgatcaccactgttgtgtcaatagatatttttattatttcaacttgtagataatgaaacagaagctagtagagcctgccccaaatcaaacagcagaaacaagtcttaagtttatgccattccaatttgaaagaaaatttgtactagtttgctatttctactgtaagaagttgccacaagactgaattattctgaaatcacagaaaataacattttatagttctagagttcagaagtccaaaaggagtctccctgtgctaaaatcaaggtgtcagcaggaccacctttctctgttcgccaggaacaccctccccctttgtttttctggctgcatgaactttccctactctcctcaaacttgacactgtcatctcatttcctttttggacacttctggccctcccccagatgttaagtgtcctcaccagaatgtagataaaataatatccttaatcacagcccctatccttcaagttgcctcatcttattgagatcagtggaagaagcctgagatagcttagccatcttgtctacattcttgcccctttcctgggagcacatgcttccaaggaagtaatatagtacatgctgatgagtgtgcacacagatcagaaaacagtcaatgtgtatttgctaattccatttttgctatgtttaaaatatttgttatttacttagtaattttaaagagattttaaatgatacttatattcattggacatataggttcttaagattttaaataccaaattaactccttaaggctagctgtatgttcctctatacttaagccactcaacattttctttttacaaggaattttgttcctattgtctctcttccactgtactatcttccaacagctgctttttgttctatgaccttttttttttctgaatcaagtgtctctctgcttaactatcttgtaataaactgatacacttgattgtattttgtcaatttactttcctgtaaagtagactatacactattcaggtgaccttttccttgaatggagttctttttatgaaaatatgtctctttttcttattgtggattagtagtaccatcacagtgctgtcttttgctctgaccaagaacaaatgttaccttggctatacatgtatgagattgcatgtttctgtagcttgcttattttacacacacacacacacacacacacacacacaccacaaggatacacatagatttcatgtatttaatgcttttattcttatttttatgattttttaactcttattttttaagaaaaatttctttgcatattagtttaaatatatgcatgtatttaagcaacatatcctcagactggcatatactctatatattcatataaatgcatcttatataatttaaatttatatactaaatatatttatatacacatttatgtttagttcacattgttttctatatatttctatatatttataaatgcttaccgtagggtactgctattggatggggtcatcattcataattagcccaatattgaaaattaaagaacagccacatctcccacatctgtcaactcatgacctccaactttgctattgtttcttgtcatgcatatgtctgttttgtgttacacaggtggtcactgtaccagatcaactttctctatgtatttattgatcagctccttgaagaaggttatttttcagaattcttattcttgtcttaacatgtttcttaagccaggtgtctcttacttattcatgaaatgtatgagtgctcattttgtagcaagcatcttactaaagacattccctcatccctcattacctgcccttgttttattgggacagtcccatcatggcccatggttactcagcatttactgggacttcttttctaacactgtgtaattaggaaacagtcaactgctatcaacattttctttccacatgttctcccctctttcattcccttcttctctctgtgcttctttctatttttttcttctttttattccaaatattgaggataaaactgagaggagtgttatctgatactgttactgggtatgacgtatgaaatatgtcataaaataaaaggcaaaatagaaactcccaaggcagtgagatggatacagcatctcctactaggtgctaggagagattatgagacgtagaggctctctcattttgctaacatcctaacctcattgatttttccagaattagtaaagatataagttagaaagaagacagtgatcaggggcatgagagatgaggctgaggagttgcaaatgtggccaaaattcacatgtatgaaaatgttataataaaatactcactgtatacttggtatataataataaagaagaccaaacatttcagtgttttttgaaataggattgatctttgggtcaccttcatttactttcattagatacatgccggtgtgccattaaaattcagctatacataaagtaagaacatttttattccagcagacctggatttgattcccagaacctacactcatcagtaattccagtttcagaaggtctgaagccctcttttgccatctgtagacaatgtatacatactggatgtgcatgcatacatgatctacacaaagacaaaacatccatacatattaagaaaatttccagccaggcatggtggcacactcctttaatcccagcactcgggaggcagagccaggaggatttctgagttcgaggccagcctggtctacaaagtgagttacaggacagccagggctatacagagaagccctgtctcgaaaaaccaaaaaaaaaaaaaaaaaaaaaaaaaatttcctggaagtgtaacacatcagtgaggacctgtaccctagtgaatttgcaactttggatgtaactttcacaaacatagccaatttttgagtcatgttctacaaaatctgggctgctagagggatttttttagaatccatactaatagtggatattctaaataatgtacattcacattacatttgaaaagaaattattggttaatctcttttcttgaaataaaaatgtcacatatacttctatatgagtgtataaacaacaatatatgatatttaataattttgtcgcttataatatagaaaataataattatattcatatcacatatataattatgtaacataatatgtgatttgtaattatatcttttctctggtgataatcgtgcgtggtgcctagggtgtagtttggaatagcatttactactccacctgtcattccattctcttaactcccttgtacatttaacattaagtattacttggttgtacctgtattccttgctaccattttgctccatcttctttactggcttgtttcctagggactgactagtactgttttctcctagaaaggtcttcttttggtctattcaaataaaaacatggagttctgattgggatttagattgaagtatacgctggaggaacaagaaaactctggtaaattgtctggtacacaagaaagcatgccaggtcattccggtcattatatcattctgactctgctaatcaatgcagttaccaggtctggggaaatgtactctacccatcccagagtcacagtaaactacagcgcagggtgtgggtatggaatcaacccattaggaagtgaataattgagacaaaaatgtaatctctatggggaggaaactgtaataatggcctatagtgttgttgctgttcttggtgttctgtttgcttgttttgttattatcagaagctgtctcatacttttcaaagcagtttcccttattaaaatgaaaacgttactcatcaacttgcttgcatttacccttgaagatcttatcttagtaatgatagaaaaagagaagaaaggactacagtctccctgtaaatatcagacatattattgaatatcatacttgtcattgaatattccagagacacctgatttccaacaaaccccagtcatttcttggattccttttttaatggccctataccaattcttcttggattatcctgacatttttctttctctaatcctttaatatatattaatgtaataggtttaagtttagggtctgtgagctgggtgagtgctctacctttgagctccagccttattctttttactttcattctgaagtaggatctctgtgagtctcaaactggcccactttaagtgtaagatctgcctaccccaacctcccaacaaccagagactaaaggtttacaccattaaataaggaaattgtctcctcacttcatttaatttaactgagagacttcacttttaactaaaacgttgacttgcaaaagcctggaggctgaagcatcttactttaagagagaaatctgagagtgcctgtacttagaagtttcagatgttaagttctggcttccattgactacaggataaaactaaaatatcttcagataatatctaagtactttatgactgcactccacctgggaaacctacaatttctagctatttttccttatcaaacgctcagtgtttctagaaaacatacttcaaaactaacacttgactgggtattgtggcatttacataaaatcctagtattcaaagatgatggcagtaggattgtgagatgaggatcagcctgtgctacctaggaaaatgtagatttaaaaacaaaaacaaacaagccaaaaaaccaaacaaacacttttcctttactcttcagatgattcagtcactgtttttagagtgtcacaaactgtcttctttattcaccaaatctggatctgttttcaagaaccaaatcaaaagtttgctttattctttggccattcctgtctcataaaaggagttagtgatccttccctggggtttcagagcatgttggtcaactatgtcttaaaggatttattccatgtggaaagggatgtagctctgtgatacctccaacccccaaacaaacacaagtcatgaacagcatccttggtacattctcagtaccttatccaatatgtgaatgagcttgtgtacatgtgtcttatgaatatacatttatgtaaatgtattttattaatacttcatttcctattgtaaaaacaaaagatattttgtaaaatttttatttataaattttaatttataaaatttaggtgtgttagcaactaataataatatatggcattaccccatactggggcatatgatccttgcaagaccaagggcctctcctcccattgatgaacgactaggccatcctctgctacacatgcaacgagagacacagctctggagggtactggttagttcatattgttgttcctcctatagggttgcagaccactttagcttcttgggtactttctctagctccttgattaggggccctgtgttccattcaatagatgactgtgagcatccacttctgaatttgccagacgctggatagtctcacaagagagagctatagcaggagcctgtcagcaaaacattcctggcatatgcaatagtgtctgggtttggtggttgtatatgggatggatccccaggtggggcagtctctggatggttcttccttccatctcagctccaaactttgtctttgtaaatccttccatgggtattttgttccccatactaagaaggagcgtaatagccacaatttggtttcttcttgagtttcatgtgttttgcacataatatcttggatattctaagtttctgggctaatatctgcttaccagtgagtgcatatcatgtgtgtcatttgtgattgggttatctcactcaagatgatatcctccaaatccatccattttcataagaatttaatgaagtaattgtttttaattgctgaatagtactccgggtatggccgtctctagatgccctccaggtccatccatttgcctaggaatttcataaattctttctttttaatagctgagtagtacttcattgtgtaaatgtaccacattttctgtatccattcccctgttgagggacatctgggttctttccagcttctggttattataaataaggctgctatgaacataatggagcatgtgtccttattacaagttgggccaggaagccggagtgggtgggttggggaacagggtcggggaagggtatagagggcttttggcatagtattcgaaatgtaaatgaagaaaatatgtaataaaattagaaaatttcaaagatgacccacaaagaaattatatttaaggaattatacatgctaatttctgacttaaccattttacattgtatagatgtattgaattataacctaccaccccaataaatttgtacaatcactgtgtcagtaaaaaataaagtggagtaaaaagaaaagaaaagaaaaggaaatatatgcatgataagtattgttttccattgcttaaaaaacttttgttaatattttaggattgtttctttaaataattaataaattctttaaccacatgagatgtattattttcaaaatgtaattgtagaaattcatataattgcttctctatcactctagagtttgcattccctcaagagtcattttatcttactttatgccttgtccaagacatagaaatcgtttagttttgtgcatcttcactatagtagaaacagacttttgatttaaaattcttcagtgaattaggaaagtgtagctgctgtcagtgaacaagaacacatgttgtgttctactaatatcagtacagaatgtttgcattaaggatattttatagcatatcttcctaactggcttttacttttgcactttataagctattgctataggtccaatctgaaaagaaattcagtcaatcaaataatgttacagtgcttgcactgcacagggttgcaaggggttaaatcattttgatctgtttcttcttcttcttcctcttcttcttcctcttcctcctcctcctcctcctcctcctcctcctcctcttcttcttcttcttcttcttcttcttcttcttcttcttcttcttcttcttcttttctctttatagtaaacccaataacttcttgtctgatctcattatgatccttgtcacaactctctgacttttattcactcatgtgctccatgactcattcttctctggcaccacaagcactataataatgccctaacttgtttgggtgatcttcttgataaaatccagaaaatttctcaatataatgggaagacaatcaaaataaaaaatgcttgaagggttcaggtagtgggacatactatttatttttcattatgtgccagaatatcaaaattctgacatgcatacttttgatttagttcataatgaacccaaggaaaaattgaaaatttgaattattccactgccagtggggactgtatatcatgaggaggaagccagctcatataaccaactctgtaccattatcttcagagtgtcaggcagtcttccttttgtttcattttctgtagggcatttaagtaattcattaactgtgtggttattttatattagcaatctcatgtggaactgtagaaagacgtgtgatgtaatcttctgtgaatttgaatggctagtaatgatgtttgatgttggagtgattcagatattttaaggtactttcctagaaattatctcctagattcaatagccctccacaataaacagtagaattctcaaaatttccctatctggtcttcttcattcagctctgcttctgtttcattgttcttccctttgaaagaagacaatttggagcggaggaaagggtacaagagtgtgaatccaggtaattcagtccatcttgtcttgtcgaattagtttgacttgagggatcatttcccttctctggaccttggttttctaattggaaaaacaggaataatgttgtgatattagtttgtgataatgttgtaaagattaggtcaggaataaacaaaagctatgaacagaacagaccaagccacttaacttttctcaagggaagctgtcaaagcacaaagaaaaaagactttgatatatgtttctcagtcatagatgtggagtagacaatcaattttctcagtttcattttcttgtatgaaaaatgggtatagaactatgtacctttcataggtattgaatatgttacatgtgtattactcttatcacagctctaaatacaaaaagaatgttcttctatatttattctctgtaccccaaccccaatgaatctgtgtagcattgaaggtaagcataaggctgaagattgaagacttgtgattttattatttacaatgcattgaggagacccaatggcttagtggataaaaagacctgagtttaaatccctagcactcacatagaaccaagcatggcttcttgttcctataatcccagcattggtttgatgggtaaagacaggtagatcctaggactctgacaaccaatcagccaaggcaaagtggcaagaataaatccagcaagaaatttcatctcagaacacaaggttcaagaaaaatagaaaacatctgacatccttctctggatttcacacacatgaaccaagggtacaaacacagagacacacagacacagatacagacacagacacagacacagatacacacacacacacacacacacacacacacacacacacacacacaaacacacacacaaaatcattcagcattgagaattctctttttcatagtcatatattgtggtctttattgtggcaatagaagaggatctaggagctactcattgctcatttgagagaggattagaaccatctagacaaaagtgaatattaaatactgagacatattaacaatttgcaaaaaaatacaaatattggaaacatggtaaattttctattattctaccgaagtctaactttgtaagccagtgaacatattgaggttagttacaggagtatgggtaaggagctacatgaaagaaaagcccactttgctacaatggatgactgttcatgaaacttgcctatttggaattctcttcacaccttgaaagcaacttgactactagaaagttgcctcttgaggtgagagcagtatcttgtatctggggtcactcagagaccagtccatgcaggagagctcacaggcctcaaaaccaacagagctgctaggacagggtctcttcggagcttcatcttcagccaggaggcaaagctgagcgccacacctctgttcaccttccctgaaaaaggagaacttgtctgcagagagtgctctgactactgggactgaagaaacagttggactcccaggattgctgacagaggctaacagaatcacaggaggaacaaactctagccagcaacacctagaacatatatcatcagagcttaccagatggcaaaaggcaaatgtaagactcttactaacaggaaccaagacaactcaacagcatcagaacccagtactccaatcacagtgagtcctggacaccccaacatccgaaaagcaagattcagatttaaaatcatatctcatgatgctggtagaggaatttaggaagggcaataataactaactttaagtaatacaggaaaacactgctaaacaggtagaagatattaaagaggaagcacaaaaatccctcaaagaattacaggaagacacaaccaaacatgtgatggaactgaacaaaaccatccaatctctaaaaatggaagtagaaacaataaataaaacccaatggaaaacaactctggagatagaaattctaggaaagaaatcaggaaccaaagatatgagcatcaacaacagaatattagagatggaagaaagaatctcaggtgcagaagattctatagaaaacatggaaaaaacaatcaaagaaattacaaattgcgaaaagatcctaactcaaaacatccaggaaatccaggacacaaatgaaaagaccaaacctaaggataataggtatagatgagaatgaagattttcaacttaaatgtccagtaaatattttgatagttttgctgggtatagtagcctgagctggcatttgtgttctcttagggtctgtataacctctgtccatgatctgctggctttcatagtttctgatgagaagtctggtgtaattctactaggtctgcctttatatgttacttgaccattacttacttcttactttttatttccttacttctcttaatatcaatggactcaataacccaataaaaaaacatagaataacagactggctacataaacaggacccaacactttttttatttgattcttttttttaattagatgttttctttatttacatttcaaatgctctcctgaaagttcccagatggccagtatccatctgtcatgaacaaggcttcctcatagggtatgaaagtcctgggacctaagtgtgtttgagagctgcaaatgatgtcacctgtgatagaatcttgggggaggggtcttaatgttcattttacttagttgtgccataataaataaaatatgtatagatgagaatgaagattttcaatttaaatggccaggaaatatcttcaacaaaattatagaaaaaaaaatttctaacctaaagaaacagatgtccatgaacacacaagaagcctacagaattccaaaatgactgaaccagaaaagaaattcctcccaaaaataataatcaaaacaacaaatgcactaaataaagatagaatattaaaagcagtaaggaaaaatggtcaagtaacatataaaggcagacctgttagaaatacaccagacttcccctcagaaactatgaaagccagcagatcctggacagaggttatacagactctaagagaacacaaatgccagctcaggctactatacccagcaaaactatcaattaccatagaaggagaaagcaagggattccatgacaaaaccaaattcacacatctttccacaaatactgcccttcaaagactaataagcagaaaactccatcacgagggaaattatgccctacaaaaagcaagaaagtaatccttcaagaaaacttaaagaagatagctgcaaaaccaaatcacaactgtgacaacaaaataatgggaaacaacaattacttttccttacttctcttaatatcaatggactcaatatcccaataaaaagacatagaataacagactggctacataaacaggacacaacattttttttatttgatacatgtttttaattatatattttctttatttacatttaaaatgctatcctgaaagttccctataccacaacccccacacacccttttcccctacatacccactcccaattcttggccctggcattcccctgtattggggaatataaagtttgcaataccaaatgggctctcttcccaatgaggcctgctaggccatcttcagctacatatgaagctagagacacaagctcgagggttactggtaagtttatattgttgttccacctattgggttgcagatcccttcagctccttgggtgctttctctagcttctccattgggggcctcgtgttccatcctatagatgactgcgagcatccacttctgtatttgccaggcactggcataccctcatacatgatagctatatcagggtcccttcaggaaaatcttgctggcatatgaaatagtgtctgagtttggtggctgattatgggatgggtctccaggtgaggtagtctctggatagtctatcctttttgtcttgcctccaatctttgtttctgtaattcctttcatagttattttgttccctattataaggaggaatgaatacgtcacacgttgatcttccctcttgttgattttcttgtgttttgcaaattgtatcttgggtaatctaagtttctgggctaatattcacttatcagtgagtgcatagctaatgacttcttttgtaattggattacctcactaaggaagatatcctccagatatatccatttgccaaagaatttcataaattcattgtttttaatagattaatagtactccattgtataaatgtaccacattttctgtatccattcctctgttgagggacatcggggttctttccaaattctggatattataaataaggctgctatgagcatagtgcagcatgtgttcttattaccagttggaatatattctgggtatatgctcaggagagatattgctagatcttcctgtagtactatgtccaattttctgaggaactgccagaccgacttcaagagtggttgtacaagcttgcaatcccaccaacaatggaggagtgttcctctttcttcacatccttgccagcatcttctatcacctcaaaatttgatcttagccattatgactagtatgagatagaatctgaaggttgttttgatttggatttccccgatgattaagaacgttgaacatttttttcaggtgcttctcagccattcggtattcctcatttgagaattcttgtttacctctgtactccattttttaatggggttatttgaatttttgaagtccagcttcttgagctctttgtatatattggatattagtcccctatcagttttaggattggtaaaatgttttctcaatctgttggtggcctttttatcttattggcagtgtcttttgccttacagaaaccttgcaattttatgaggtcccatttgtcaatatttgatcttacagcacaagccattgctgttctgtttaggaatttttcctgctctgcccatgtcttcgaggcttttccccactttctcctctattaaatatagtgtctctggttttatgtggagttctttcatccacttagacttgtgctttaaacaaggagataagaatggatcaattcacattcttctacaggatagccaccagttgtgccagaaacatctgttgaaaatgcagtctttttccactggatggttttagcacccttgtcaaagatcaagtgaccataggagtgtgtgctcatttctgggtcttcagttctattcaactggtctacctgtctgtcattgtaccagtaccatgcaatttttatcacaattgctctgtagtacagctcaatgtcaggcatggtgagtcccccagaggttcttttattgttgagaatagtttttgctatcctagattttttgttattccagatgaatttgcaaattgcccttttctaactgaatgaaaaattgagttggaattttgatggaaattgcattgaatctgtagattgctttcggcgagacagtcatttttaccataccaatcctgccaatccatgagcatggaagatccttccatcttctgagatctttgaatagttctttttgtttttgattggttgatttcagccccaagtttgaatatttccttctggctactcctcttgggttaatttgcttcctttcattttagagcgtctaggtgtgctgtcagacagttagtgtatgctctctctagtttctttttggaggcactcagggctaagagtttttcttaggaatgccttcataagtttgggtatgttgtagcttcattttcattaaactctaaaaagtctttaatttctttctttatttcatacttgaccaaagaatcattgagtgttgttcagttttgatgtgaatgttggcttgctattatttatgttgttattgaagaacagccttagtccgtagtgatcagataggatgcatgggataatttcaatatttctgtatgtgtgctggcctgttttttgaccaattatatggtcagttttggaggaggtaccattaggtgctaagaagaaggtatgtccttttgttttagcatattatgtagatatctgttaaatccatttctttcataagttctgttaatttcaatgtgtttctgtttagtttctgtttccagaatctgtccagagatgagagtggggtgttgaagtctgccactattattgtttgatgtgcaaagtgtgcttcgagctttactaatgtttctttaatgaatgtgactgaccttgtatttggagcatagatattcagaattgagagttcatcttggtatatttttacctttgatgagtatgaagtgcccctccttgtcttttttgataactttgggttggaagtcaattttgttcaattccattgcctgtttggttgtgctttcctgcagttttaaaagggatttttgtgttccatctttaaaggctacttctacctctttagcaatgttttcctgtatttaaatttaaatttaactttaaattttctttttgttttgttttgtttttattaagttttttattaggtatttatttcatttaaatttccaattctatcccaaaagtcccccacccactccccttcccactcccccacccacccacacccacttcttggccctggcgttcccctgtactgaggcagataaagtttgcactaccaatggacctctctttccactgatggctgactaggccatcttctgatacatatgcagctagagacacgagctctgggggtactgtgtagttcatcttgttgttccacctatagggttgcagatctctttagctccttaggtactttctctagctcctccatttggggccctgtgatccatccaatagctgactgtgagcatccacttctgtttttgctagaccctggcatagtctaacaagagacagctatgtctgggtcctttcagcaaaatcttgctagtgtacgcaatgatgtcagtgtttggaggctgattatggtatggatccctggatacggcagtctctagatggcccatcctttcatctcagctccaaactgtgtctctgtaagtccttcagtgggtgttttgttcccaattctaagaaggggcaaagtgcccacactttggtcttcattcttcttgagtttcatgtgtttagcaaattgtatctagtatcttgggtattctaagtttctgggctaatacccacttatcagtgagtatgtattgtgtgagttcttttgtgattgggttacctcactcagcatgatgccctccaggtccatccatttgcctaggaatttcataaattcattattttttaatagctgagtagtactccattgtgtaaatataccacattttctgtatccattcctctgttgaggggcatctgggttctttccagcttctggctattatgaataaggctgctatgaacacggtggagcatgtgtccttcttactggttggaacatcttctagatatatgcgcaggagaggtattgtgagatcctccggtagtactatgtccaattttctgaggaaccaccagactgatttccagagtggttgtacaagcttgcaatcccaccaacaatggaggagtgttcctctttctccacatcctctccagcatctgctgtcacctgaatttttgatcttaaccattctgactggtgtgagatggaatctcagggttgttttgatttgcatttccctaatgattaaggatgttgaacttttgtacaggtgcttctcagccagtcagtattcctctggtgagaattctttgtttagctctgagccccattttttaatagggttatttgattttctggagtctgccttcttgagttctttatatattttggatattagtcccttatctgatttaggataggtaaagatcctttcccaatctgttggtggcctttttgtcttattgaaggtgtcttttgccttgcagaaactttgcaattttatgaggtcccacttgttgatacttgatcttacagcacaagccttcttctgttcaggaatttttccctgtacgcgtatcttcaagggttttccctactttctcctctataagtttcattgtctctggttttatgtggagttccttaatccacatagatttgaccttagtgcaaggagataggaatggatcaatttgcactcttctacatgataactgccagttgttacaacaccatttgttgaaaatgctgtcttttttccactggatggttttggcaccctgtccaagatcaagtgaccataggtgtgtgggttcatttctgggtcttcaattctattcaatgggtctacctgtctgtagctatatcattaccatgccgtttttatcacaattgctctgtagtacagctttaggtcaggcatggtgattccaccagaggttcttttatcacggagaagagtttttactatcctaggtcttttgttatgaatctgcagattgccctttctaattacttgaagaattgagttggaattttggtggggattgcattgaatctgtagattgctttcggcaagatagccatttttattatattgatcctgccaatccataagcatgtaaggtctttgcatcttctgagatcttctttgatttctttctgcatagacttgaagttcttatcctacagaacctacaagaggttcttttatccttgagaagagtttttgctatcctagggttttgttatttcagatgaatttacagattgccctttctgattcttacgtttgccttttgctatctggtaatctctacagttagttgttatagttgtctctgtttggagcttgttcctcctgttattctgttagcctctgtcatcagtcttgggagtccagctttctcctgaggctcagtggtcagagtactctctgcaggcaaactctcctcttctggtgaaggtgcatagaggtctggcgttcgtacctgcctcctggctgaagatgacgtccttaaacagggtctgtcccagaagatgtgttgcctctgcagtctgcacgctcacctgcacagactgtctctgagggatgcaggacacaagatggctctcttacctgctcttgtggtcagagccctcctgggcaggcaactctcccctggtggggaaggtgcctgaatgtctagatcccaaaactgggtctgtcccagaacctgtaccatttttgcgtgtctcagaagctgtgtagcttctgcagtccacattctcacatgcacagactggtctttgagggacctgggacccaagatggctctctcacctgttcagtcagtgagagccctcctgggtgggcacatctcctctggcagggaaggtgcccagatgactgtagctggaaacggcttctgtcccagaagctgtgttacttctgtagtctgctagctcaccttttgcagtccgcaagctgacctgcacagactagtctctgagggaccagggacccaagatgactcactcacctgcccccaggacccaacattttggtgcatacaggaaacccacctcagggacaaagacagatactacctcagggtaaaaggctagaaaacaatcttccaagcaaatgatctgaagaaatgctggagtagtcattctaatatgaaataaattcaacttccaacacaaggttttcaaaaaagacaaggaggacacttcatactcatcaaagctaaaatcttccaagatgaactatcaattctgaatgtctatgctccaaatgcaaaggcatccatgttcattaaagaaactatagtaaagctcaaagcacacatcacaaaataattgtgggagacttcaacaccagactctcacgaaataaaagatcctggaaactaaacagaggcacaatgaaactaacagaagatgtgaaatgaatagatttaacagataactacagaatatttcatgctaacacaaaagtatataccttcttttcagcaccttatggtaacttttctaaaactgaccatataattggtcacaaatcaggcctcaacagacataaaattattgaaattatcccatgcatcctatcagattaccaaaaacgaagggtgatcttcaataacaacataaataatagaaagccaacattcacatgaaagctgagcagcacactactcaatgataacttggtcaaggaagaaataaagaaagaaatttaagaatttttagagtttaaagaaaaggaagccacaacataaccaaacttatgggatacaatgaaagcagtcctaagaggaaaactaatagctctgagtgtcaccaaaaggaaactagagcgagaatacacttgtatcttgatagcacacttaaaagctctagaacaaaaagaagcaaatttgcccaagaagagtagacggcagaaaataactaaacaatgggctgaaatcaaccaagtggaaacaaaaataactgtacaaagaataaacctaaccaagagctgtttttgtttgtttgttttttcagaaaatcaacaagatatgcaaacccttagccagactaactagtgggcacagggccagtatcctaattaacaatatcagaaatgaaaagggaggcataagaaaagaaactaaggaaatacaaaatatcatcagatcctactacaaaagcctgtactcaacaaaactggaaatcctggatgaaattgacaattttctagacagacacctggtaccaaagttaaatcagaatcagattaatgatctaaacagtcccatgttccctaaagaaatagaagcagtcattaataatctcccaaccaaaagcagcccagaaccaaattggtttggtgcagagttctattagaccttcaaagaaggcctaattcctattctcaaactattccacaaaattgaaacactaagccacaattactctgacacttaaaccacacaaagatccaccaaagaaagagaacttcataccaaattcccttaagaatatctactcaaaagtacacaataaagttcttgagtactgaatccaagaacacatcaaaacgatcatccatcatgatcaagtaggcttcatctcagggatgcagggatggtttaatatatggaaatccatcactataatccactatataaacaaagtcaaaaacaaaaaacacatgatcatcttgttagatgatgagaaatcgtttgataaaatccaacaacaattcatgataaaagtcttggaaagatcaggaattgaaggcccacatataaacataataaaagcaacaatatactgcaaaccattagccaacatgaaactaaatggagagaaacttgaagcaatcccactaaaatctgggactagagaaggctgtccactttctccctacctgttcagtatagtacttgtagtcctacagagcaattagagagagagagatagatagagagagagagagagagagagagagagagagagagagagagagagagagagagatcaaggggatataaatgggaaaggaaaaagtcaaaatagcactcttttcagatgatataataggatatatgtgaccctaaaaattccaccagagaactcctaacctgataaatggcttcaacacagtagcagaatataaaattaactcaaaaaagttagtgatctttctctagacaaaaaggacaaagaggctgagaaagaaattagggaaacaaaagtcttcacaatattcacagataactctaaataaggaagttaaatatctgtatgataagaacttcaagtctctgaagaaaaaaaaaattgaacaagatcttagaagatggaaagaactcccatgcccatggattggcaggattggtatggtaaaaatggctaccttgccaaaatgaatctacagattcaatgcaatccccatcaaaattccaactcaatttttcactgagttataaaagggcaatttgcaaattcatctggaataacaaaaatcctaagatagcaaaaactattctcaacattaaaagaacccctgggataatcaccatgcctgacctcaagcaattgtgattaaaactgtatggtactggtatagcgacagacaggtagatcaatggaatagaattgaagacccagaaatgaacacacacacctatggtcacttgatctttgaaaagggagctaaaaccatccagtggaaaaaaggcagcattttcaacaaatggtgctggctcaactgacagttatcatgtagaagaattcaaattaatccattcttatctccttgtacaaagctcaagtctaagtggatcaaggaactccacacaaaaccagaggcactgaaacatatagaagagaaagtgggaaaaagcctcgaagatatcagcacagggaaaaaattcctgaacagaaaaacaatggctgtgctgtaagttcaagaattgacaaatgggatctcatataattgcaaagcttctgtaaggcaaaagatactgtcaataagataaaaaggccaccaacagattgggaaagaatctttaccaatcctaattctgataggggtctaatacccaatatgcacaacgagctcaagaagctggactccagcaagtcagatacccaattaaaatatgagatacagagctaaacaaaaatttctcaactgaggaataccgaatggctgagaagcacctgaaaaaatattcaacatccttaatcatcagggacatgtaaatctaaacaaccctgagattcgacctcataccagtcagaatgcctaaggtaaaatatttaggtgactgcagatgctgctaaggatgtggagaaagaggaacactcctccattgctggtgggactgcaagctggtacaacctcgctggaaatcagttgcgcagttcctcagaaaattggacatagtactactggaagatccagcagtgcctttcctgggcatatactcagaagaagttccaaattgtaacaaggacacatgctccactatgttcatagcagccttatttataatagccagaatctggaaagaacccagatgtccctcaacataggaatgcatatagaaattgtggtacatttacataacggagtactactcagcaattaaaaacaatgaacttatgaaattcttaggaaaatgaatgaatgaatacatgatatgcactcactgataagtggatagtaccccagaaacttacaatacccaagatacaatttgcaaaacacatgaaactcaagaagaaggaagaccaaagtatagataatttgttccttcttagaatcgtaaataaaatacacatggaaggagttacagatacaaagttcggagctgagaaggaaggaagcaccatccagagatggccctacctggggatccatcccataaacaaccactgaacccagacactattgcatatgccagcaagattttgctgacaggaccctgatatagctgtctcctgttaggctatgctagtgcctggcaaatacagaagttggtgctcacagttatctcttggatagaacacagcgtccccagtgaagaagctagagaaagtacccatcgaagtaaaggggtctgcaaccctatacaaggaacaatgttatcaactaaccagtaccacctccatagctcatgtctctagttgcctatgtagcagaggttggcctagtcagccatcagtggaggagtggcccttggttttttgaagattatatgcctcaatacagggaaacgccagggacaggaacctggagtgggtgggttagggagccgggcaggagagtgtatagggaactttttgggaggaaactaggaaagggaataacatttgaaatataaatgaagaaaacatctaattaaaaaaaaggaaaaaaaaaaagaaaggaagtttcctctcttaaataactgctactacttatataactctgagtaaagtccttatgaatcctgtacctttcagtaagttcctgagttttgtgagttttatgtacttccttagtcctgtaacaattcacttccttcctgaactcctgtgagcttctctcatggagggcttctttcaaatgagagtcaacagttgcacaataggaactactttggaaaccccaaaacggaagcgtgctgtttcctcttttcctggtccctttatgaaaaaaaatgtctgactctcaatatagggtttaattttttttgttagttttttaaaataattgaacaaattaaatgagacctataatcagaatagtccgaaagagcaagggcttcaaaaatgtcaacaacaacatttaaaatgttataagtgaaatcaattaagtagatcataatttgaagacagtcagtgtaattatatcctgaaaattatttaggattatttgatgatgtcagatctcccccctccccaacacattcatgtataaacttggtcaaaattattaatatgtctcactatgtgttatgcttaagaatctctgggtatattgttttagacaaaaggaaaattctaattcttgagacaaatatatgaatattttgcagaaaaaatagtaagcatcctcatttttttttctaatttggaattaagaaaacagtgaaatgaaagtgaagtccatttaggagacgttgtggtttgttctttatcatgaaggaattgttgtcagttctgctggtcctcccattgtttctgcctgaacataaaggatatttaatgaaatatgttagggagactttttaaaaagttaacctgtcaggtacagataaattggagtggaacctagaagatgaggaggaaccatgatatcttaacttctggtttttattgatatgtttttatgtgggcatggacatgaatagaggccatgaaactaggaagtatagtacttaagtatatagatattttaaatatatagaggttttaagaaaggagagtgtggaagtcagtaaacacacatggtctgaaagtaaaaagggcactgggaatgggaatagaaaagaaaagaagggtggagattttgctcatagtgtttcagtagaaattgtgacccttcctaaggcaatatgctaactaaaaattgtataatagtttgaataggagattactcagtttgagaaaaaaaataattattggctaggaaaagaatagcaaccctataggtagaaaaaaataatgagctaaccagtaaccccagagcttgtgtctatagcagcatatgtagcagaagatggcctagtcgggcatcattgggaagagaggccccttggtcttgcaaactttatatgtccctgtacaggggaacgacagggtcatgaattgggagtgggtaggtagggaagcagggtgggggggagggatgctataggggacttttgggatagcatttgaaatgtaaatgaagaaaatatctaataaaaaatgaaaaaataaagagtagacgctagaacacatttttgtggcaattggaagaaggggagaaattttgtagtgagaaggaagtgccagcaaaaaagagtagctgtaaataagaaaggaaacttgtgaaggcataaacttactagtataaaaacattgcctgtaagaaaagaagtccctttcccttgtagcctagattaaggctaatgtgtaatggagcttatattgcctgtgcataatggtattatatgcatcattaaattgaagactaaatttacctctttcatgattaaaatacctcatttacttgatactttttgtgtgtaaaacatttactttgccatgaaagaaaaatattcttatgaccataactatttcaaatacattacttttgcttgaaaaaatttataactttaccatttcagattttatagacaatttggaaaattagaagattgaatattgaatgaagatattagatttatgttcttaatctagttaaagtggtctgaataatgataaaaccttagtacagaggaacaccagggccaagaagtgggagtgggtgggtaggggagtgggagggggagggtatgggggacttttgggatagcattggaaatataaatgaagaaaataccgaattaaaaaatatatatatatacctgtttaataggttagaaatctaaccacaaatgttgatttccagctacaagactttatagtttgagttcattcaatattcatagtaaattaagaaaaacttcaaggactataaaattatacttattattttaagaaaacatggcttaagttatttacatttaaaaggagattaaatgatatttcttttctgcttattaaaggaagactgtgacatcaagaattataagtcatagctaagttcacagaattaagagaaatatataaataaaatatataatatgatatgagtttgtatatgtgtgtgtgtatgtgtgtttgtaccctctgtatctaggcatgttatggtacaaaggtccatcttttaagtgttagaagagaataaacatgtgagcttataattattttattgagctttcttattttatgacccactaatggtttgtgagtcacttacactgatgtatactaaaaactttcagcttcaatgaggctagtttctaaaatttattcattcattgtttttgtttttaaatgcaaagatcatgtttggtttccagtcttattatccacttacaataaaccacaaaagtataattttatattaagaaggaactaaaacatgctgattgtatccaactggcagcgtgtatataattttctaaagtacttttaatttctaatgtaaattgttgaacttctaagcttgagtatgtcttaatacccagctctacaatatcaggtttattttacttccttcacatttttggctgaaattactaaaaaattaacccaatggaattagttatcacttgtgctgagctaacataattgaaggctcattttaaaaagttgagattccatgttctttcatttttgttatttgcatcatattttatgttgttgacagtcatacagtaagggtttctttatctgtttttgcaagcaatttattcttcccaaagttgtcaattgcactaagacttttcaccttctctcagtctaaacaataaatctgtgcactgagtcagaaatcacctccagttctgtgaataaaaactagatagagagtaagtgatccacttcagtattagtgtagctactgctcacgagtgccccacctcaatgttagcattgctactgctcacgagtaaattcaatttgaaaagtaaccacaaagttttttttaattatttattttatttagttaattttaacaaggcaccttattcctctcctgctgattcagcaattcaagaggctgaggcagacaaggaccacttgagttcatagtttaatgccaggcttggcaacaagaaagtgtcaaaccagaacagcagaggttcagtagagtggtcaatcttcttgtctacctaggtttaaagtacaagtaaaaactaaagagtgttaaaatcaatgtaccctgataaaccccttgttttatccatctcctgtttactagatagcagcttcattagagcttccatgaatgaagagaatcgttgtctaatttaattctcaattaaagcatcattttcattgtgtgacccaatagtgaatagtaaagataatagtaaaaacaaaataaaacagctaaaaaaattactgtttgttacttttcatggaaatttaaaattatttggttttattttttccactgacctgatataaaatatctccaagccaactcatactagttcacatgttactactataaaggaaataggtaaaggactcttttccagttatcatcatgatctgtactgggcaactgttttcattcttcatatcagaggatagacttatatcctataaatcaaggctgatttagttttccatatagttatcattagggttatgttcttgagtgtttcttaaacatttgaaaatgtgtggctatgccagtgtctggcaaatacagaagtggatgcttacagttatctattggatagaacacagagaccccaatggaggagctagagaaagttcccaaggaactgaaagggtctgtaactctataggaggaacagcaatatgaactaaccagtacccccaaagctcgtgtctctagctgaatatgtagcagatggcctagttggccatcattgggaggagaggcccttggtcttgtaaagattatatgccccagtacaggggaatgccagggctaggaagtgggtatgggtgggttggggagcagggcatggggggagagggtgtaggggtcttttgtgttagcatttgaaatgtaaatgaagaaaatatctaataaaaattgttaaaaagaaaaagaagaagaagaagaagaagaagaagaagaagaagaagaagaagaagaagaagaagaagaagaagaagaagaagaagaagaatcatctccctggtctgcaagccaaattgccttgggcatgtgcccttggatataaccactcctttattccactgccccctagtcctcagtacttggcattgcagaaaattatatcttctttgccattccaaagttcaatgtgattcatctcaagttgcatttatataatgaatcctatgggtgttccctttaaaaatgtaagatgaaatttatagagagcatagttagtattaaaaaacatttatttctaaatcttattgtaacatcttctaaaaggtagaacacatttctttcttaacaaattttagttatcattccttacagctactctctctgtgctaatgtctgtagagaagaaactctgccggcattgataagagtgaccttgtagtgccgtcttctatgtaccaggatgctttctcaggaacttcccaactacatacatatcaagaaggctatcactacacagtaaagttaaagtcttggatgattcaagttagaaaggtcagctgaatatctactctttgcaatgcaaactgttagtgtgttagtgaaataaaaaatttcaagagtgacaatatttttctcttttgacctgtggatgcaaaaatacagttaaggggaataagaggtagtttattttggaacctttttgagtgacatttgcctgggatcacaggtcactccaaagttcatgttctagcattttcatgaattaatatagtttacagaaaaagaaatgtcataaatcaaggtaaaattttaaaacattggtggtacatcagagaggttattataggattgggaggggagattttcactaagtgttcgatattatctgataatacatacttttagcttctgggttggtggaaactagtggtctgctaaattaatagaattacaaagatttttacctattagtcacaggatgttagatctgacacaagtgggtaatgaatagctacttagcagctaaagccaggttgaggtgaggtaattagccctggacctgtaacattccacccacctcacattactacacttttaattaaccagtctttggaggcacagcttcttcccactaattctaattcatagttcatcttgtaaaaataacaggagagtatctctctctctctctctctctctctctctctctctctctctcacacacacacacacacacacacacacacacacacacaaagtagactttggctactctaagaaaacacatctctaataatgagttttctggtgcataaagcagtccagttctctctcagaattttctgtcattctctttttgcatcctttgcttgacagccactccaaggttttactccaatgttctttcttaggaaacacctcatgggtccctttgaccaggttctgtccccagtatgtttttcttattgcgctttaattgcatgctagctctctggctcctcacacttctggcgagttaggatgcttaggacctgatcaaacagcttgcaaagcacagaaaaatacccagaggttcttgtgtaatctcacatttgattgagcccaagctccaggttgcctattgttcctgaaggatccctgagacaaccaccattcttctaccttctccatgtgtgaagatctaagtagcagaaaacagaactgtgggaaaggaaattggtctccaaatttgcatctcagttctcagaataaaaggaaaacatttctatatccctagtagtgatcaggttatccagcccctgcagcactggatgcttataattagagaactgtatccgatgaaaagccctagaactcagttaaaatcagcttcccatttacaagatccaagtcacatatataatactataaagccaagttaaacagaaacagaaacaaaaccattaacttattttgtgcaggccagaagacacatgtgctgctgcattggtatggagtccaaaagatagcttgctagattctattctctcctttaatgtgagttccagagatcaaacttagttcttgaggcttgaaatcacatatctttatatactgtaccatcttgctggctgaaaaggctatcttttctcccttttttaaaaaaattaagttattcactttacattctgatctcagcaccctcctctcccttctctcctcccaatcccactcttacaaatccttgctccattacctcctcccattctccttagagaaggtgaaatccccaattggttaataccctgccctggaagttcaagttgcagaaggattaagggcatcctctcctactgaggcccaactaggctgttcacttccctaaggatccaatgaaagggatctaatggcaggcaacagtgtcagaaacagctcctactccaattgttagaagacctgcaagaagaccaagctgcacatctgctacaaatttatggtggggccgaggtccagcccatggatgctctttggttggtggttctatctctgtgagcacccatgggctgcagttagttgtctctgtaggttttcttgtggtatccaaacctgtctgacttgctcaatcttagccccactatcccaaaagactcaagagctctagaaaaggctgcagatattctgtctggactccacccccacagttacctggcaacagccagctatgctcctccccacggttacctggcaatgcccaagtaggcctggccctgtaaaaagagatgctttccccctctactctctcttactcttatctcccatgcctcttgtccccttgctctccctctctccccactccctccccaccctctattcatgtggtaatagccagcctctatttctctactctctccttctccctgcccttctcgctgcctctactactcttttaactcccttccccatgctctaaataaactctcttctatgcaataccatcatgtggctggtttctcagggggaagagataccttgccatgggcctgccaaggcaccaccttcccccacacttcaccacatccccatagaacatattcctataccctttatctttttataaacacaccaaaggctatttttatcctgcttctatggttgtaaattagaatcctttcttgttgttcacctcaggatcttcctgttatagtctggccactacttatttaatgagatatttatagtgctaactatacagtgctaagatcatgtttgaattttagatcctttacatatttctcactaggtacctacatgcatataggtacaaaggggtagtttacactgctcattagtggtctgaagtcagaccaccttttaatctggtaactgacaaacagagaagctagccaacaaatctacataactagttctcttaataatgtgactgatcttcctggtagctaggttgtatatgtctttccttccatttctcccagagacatgtttgagtagttcttgcactagcaatagggtttttttttaatgtatgaaatcattccaatatcacaagattattgctagctgctttgtgctcaagctatgtaatattccttttctgctatttgtctctcaacatgtaggtaggggattaaagtaaatcatttaatccatgcaccatatcattcaatagtatacttttggaaattgtttccacaggagaagcagtaaaagtaaccagtctgagatattgacactatagaaaagaactgtcagctcactccttgtattgatctggctttgctctacaaacacagattcttctccctaccctagcctgtaagtggtgcctgctgaggttgctaaattgctgtgtaaattatttattacttggacatcttgtaaatatctcatttctttttgttgtacttagttgtgttttctagggtttcatagatattgaaaggtttcaaaagatatcccaagctcttggcttcctataatacgatgtgagctacctagccagtattatcctttcattgaaaatctggttcttagttttaaattattaaaactaagccgagtattgggcaattagcacactttaaaagtaaaacttgtcctcatccactgatgccagaccaggcagtcctctgctacatatgtgtcaggggctactgatcagcccatgtatgctctttggctgatgacttagtctctgggtgctcccagggatctgtgttagtcgataattgttgttcttcctatggggtagtcatccccttcagtttttcaatcatttccatgaatgtattgcatgaggtccctgacctcagccaatggttggctgtaagtatcttcatttgcctcagtcagttgctggtagagcctctcagaggacagtcatgctaggctcctgtctggaagcacaacatgacatcctaatagtgtcaggttttggtgtctctccatccgtgagataaattccaagttggtatggtcactaaatgggtttttcttcagtctctgccacatttttgtccctgtatttcttttattcaggaacaattctgagtcaaaaagtgtgaaagtagcttggtgaccccatctctccattgggggccctgtctatttattggatatggtctcttcaggttccatctcaccactgttaggtatttcatctaaagtcatcaccattgagtcccaggagatactcacatttcaattctctgggactttctagaagttatccctacccccaccctctgcaggtgcctatttccatccattctcctaaccctctgggcttttctcctgtctccccacaccctgtacctgctcctgctccttttgcctctttctcccctctcccacacaggtccctccatatcttgacctcccatgattaatttgttctgccttctaagtgtattgaagcatcctcaattgggcattttttttttcttgttaaacttcttatcatctgtgagttatatgataggtagtctgtactttttggctaatatccacttatcagtaaatatataccatgcatatatttttgggtctgggttacctcactcaggatgatgttgcgggaaatattacaaaaagaacctgcacattcctgcacatatgctggcaactctctgcctctgtagcatggtccgaccagccatgctccaacgggcaatggccaacctgtttttatctcatgaagactctctggccaagagctttcaaaacatatccacccatctcactaggtccccactggcaggttgttaacatgccagccccatgcatcaaatcccccatggcctttttggttcacatatgccaaacctatgctttgcaaccctgcctttctctcttgaacacagttgaacccaccgtgtgaaagaaaatgcctcgcagacttagttcagaagcaatggtaactcaatcgctgggagcaacaactaaaatcctaatcttgtaagccttattaaatctaaattttcctgtggtgattccaaaactaggagacactagtagttacatcttgttctcaatctatccctgtccagaaaggacctaactctctcctgtttcctctctttttccatgtaacctggaagtctttctattcattcggtgattggtcctttattcattaggggattggttcacaagaacagcaccagctccatccacaacaggattatattttctagctccatccatttgcctgcaaaattcatggtattcttgtttttaatagctgaacagtattccactgtgtaaatgaaccacattttctgcatccattctttggttgggagacatctaggttatttccagtttctgactattacaaataagtctgctatgaacatagtagagcatatttccttgtggtatgatggagcatcttttgggtatatgcccagaagtagtatagctgggtcttcaagtagaattatttccatttttctgaggaatcccaaaattgacttccagagtggttgtgccagtttgcaattccaccaacaatgaaggagtgtctaatcctatagaaacttgatgccccagggcaggaggatgcaggcagggggcgggggaggcaccaggggcagtaccagagctgggaatgggtgggaaggcagaggggagtgaggagcactctctcagaggcaaaggggatggagaatggagtgaagaactcttggaggggggactgggaagggtgccaacatttggaatgtaaataaatgagataataataataataataataataataataataataataataatcaaacaaaaataccgtaagtggaaaaatgatatgaacaggaaatttctagaaaatacaggcaatcaatcctgtataagcatgcataaatcagattgtaattcaacaaatatgacgtaaagacaatttttcatgggttatcaataaatatgtaatgtttattaacacaaagttttaagaaagtaaaatttgtgaagtactgcaaaaaaatttatttagcagtggggttgcatggaagttcttgttgagaatttttttatcagagaaaatgtacccatttaatccacttgaactaacatagagttagtacccaaaaattataaaaaatatgttctgttatgaataattatttttcatttaggatttttggtgatgatttatggagaagaatgattttgatattcataattctttatagtataaaatacgttatgtccacccgacagggcagtttgcaacatattgtgataccttgcttttagctgtctggagtatatgcatgtacatgagtgtgcacatgtacctgtacacacatgcacattaacacctataatatgtagtacagattcatctctaataattctactattctgtcaagtttttacattggtagctcacaatgagtgcaaacgttgtgaattagtgctaaagttattttagtgacttttagaattttgaaatccacaaaacaacttctcatatatatctttacaactgattatggactagggaaatggctcagctattacagtgcctgctgtagaaatggaaaaacctgaatttaaggaacacccatgtcacctaccatcaagcctgactagttgacttcaacccttgggcttttcatagtagaagaagaaaagtaacttctacacatacacacacacacacacacacacatgtacactacaaatatacccataaacacaggctcacacacacatgcatacacacatgcacacacatataatttaataaaacaatttggaaaataacagtgaaagacacgtaataatgacctaaagtttccactggcaaagccatagatatattttcaccttcatgtacatgtacacacaagtgaatacaaacacttgaccccatccactaaaaacaaacaaacaaacaaacaaacaaacaaaaaacttatgtgatgttctttcagagtgtgagattatttttttctttaagattaatttttttattagatgttttcttcatttacatttcaaatgctatccccattcctagttttctccttgaaaatcccttataacctaccacttgcccctgctccccattctacccactccaacttcctgaccctagcattcccctaaaccggggcatagaatcttctaaagaccaagggcctgtgctcccactgatggcctactaggccatcttctactacatatgcagctagagacacgagctctgggggtattggttagttcacaatgttgttcttcctatagggttgcagacccctttggctccttggttattttctgtagcaccttcattaggtaccctgtgttccatccaatagatgaccgtaagaatccacttctgtattttccaggcactggcatagcttcacaggagacagctatatcatggtcctatcagcaaaatcttgctggcatttgcaatagtgtctgggtttggtggttgtttatgggatggattcctgagtaaggcagtttctggatggtccttccttcaatctcagctctgaactttgtctctgtaactccttccattggtattttgtttcccccttctaggaaggaatgaaatatccacacttccttcttccttcttcttgagtttcacgaactttgtaaatggtatcttggttattgtaagtttctggggtaatatcgacttatcagtgagtacatatcagggttccctcactcaggatgaaatcctcaaaatccatccatttgcctaggaaattcataaattcgttgtttttaatagctgagtagtactccattgtgtaaatgtaccacaatttttatatccattcctctgttgagggacatctgggttctttccagcttctggctactataaataaggctgctatgaacatagtggagtatgtgtccttattaacagttggaacatcttctgggtatatgcccaggagtggtattgctggatatcctggtagtactattttcagtaatctgaggaaccaccaaactgatttccagagtggttgtaccagctttcaatcccaccagcaatgaaggagtgttcctctttctccacatccttgccagcatctgctcaacttgaacttttgatcttagccattctgactggtgtgaggtggaatctcaggggtgctttgatttgcatttccttgatgattaaggacattgaagatttcttcaggtgcttctcattcttttggtattccttacttgagaattcttcatttaggtctgtaccccattttttcatagggttatttggttttctggaatccaatatctcgagttctttatatatattggatgttagtttgctatcagacttaggattggtaaagatactttcccaatctgttggtggcctttttatcttattgacagtgcccttttccttacagaagctttgcaattttatgaggtcccatttgtcaattttcgatcttataccacaaggcattgttgttctgggcaggaatttttccaccgaacccatatcttcaagtctctttcccacattctcctctgtaagtttcagtgtctctggttttatgtggagttccttgacccacttagacttgagctttgtacaaggagataagaatggatccatttgcattcttctccacaatagccttcagttgagccagcaccatttgttgaaaatactgtcttttttctattggatggttttagttcctgtgtcaaagatcaagtggccatatgtgtggggtttcatttctggatcttcaataaatttcattgatctacctatctgtcgctgtgccagtaccatgcaatttttatcacaattgctctgtagtacagtttgaggtcagacatggtgattctaccagattttcttttattgttgagaatagtagtttttgctatcctaggtttttgtaattccagatgaatttgcaaatttccctttccaactcagtgaagaattgaattggaattttgatatggattagattgaatctgtagattgtttttgtcaggatagccatttttgctatattaatcctgccaatccatgagcatagaagatcttcttcaatttcttgcttcagagacttgacattcttatcatacaaatctttcacttccttatttagagtcacaccaagggattttatattatttgtgactattgtaaagggtgttttttcccctaatttatttctcagcctgtttatcctttgtgtagagaaagtccactgattttttaaagttaattttatagcctgctactacactgaagctgtttatcaggttaaggagttctctggtgaaatttttagggtcacttacatatactatcatattatctacaaatagtgatattttgactcttcctttccagtttgtattcccttgatctccttttgttgttaaattgttctggctaggaaagcaagtattgaataggtagggagaaagtgggcagccaggtctagtccctgattttagtgggaattcttccagcttcccaccagctagtttgatgtgggttactgattggctgtatattgattttattatgtttaggtaggggccttgaattcctgacctttccgagacttttatcatgaagaggggttggattttgtcaaatgctttcccagcatctaacaagaggagcgtgtggtgttcgtttttgagtttgtttatgtagtggattacattgatggatttccatatattaaaccatccctgcatcccttgaatgaagcttacttgctcatgatggacgattgttttgatgtgttcttagattcagttagggagaattttattgattaattttgcatcaatattcataagggaaattgttctgaagttctctatcttgttgggtctttatgtggtttcgttatcagagtaattgtggcttcatagaatgaatttgatagagtaccttctgtttcaattttgtggaatagtttgaaaagaactgcaattaggtcttctttgaagatctgatagaactctgcactaaactcatctggtcatggtgtttgtttggttttttttgtttgtttgtttgtttggtttggtttggtttggtttggtttggtttggtttggtttggtttggtttggtttggtttggttgggagactattaatgactgcttctatatctttaggggataaggaactgtgtagattgttaatctgatcctgagttaactttgttacctggtattttctagaaaattgtcaatttcatccaggctttccaatttgattgagtacaggattttgtagtaggatctgatgacgtttctttatttcctcatgttctgttgttatgtctaacttttcttttatgattttgttaaatatgatactgccattgggtcttctattagtctggctagggtttgtctatcttgttgattttctcaaaacaaaacaaaacaaaacaaaacaaacccaaaagacaaaaaaaacagctcctggtttggttgattctttgtattgttcttttttgttccacttggttgatttcagccctgagtttggttttttcctgctgtctactcctcttggaagaatttgggttctttttttttttctagaggttttaagtatactgtcaagctgctagtgtatgctctttctagtttctttttggcagcactcagagctattagttttactcttaagactgctttcattgtgaccataagtttgggaatgttgtggcttcattttcattaaactcaaaaggtctttaatttctttctttatttcttccttgatcaagttatcattgagtagagtattcagcttccatataaatgttggctttctcttatttatgttgttattgaagatcagtcttaatccgtggtgatctgataaggtacatggcataatttcaataattttgtatctgttgagtcttgttttgtgaccaattatatgggtaatttgggagaaggtacatgagatgaagagaagaaggcatttccttttgtttcagtataaaatattctatagatatctgttaaatccatttgtttcataacttctgttagtttcaatgtgtctttgttaatttctgtttgcagtatctgtctattgatgagagtggggtgttcatgtctcccactattattatgtgtggtgtgatgtgtgctttgagattactaaagtttctttaatgaatgtggatacccttgcatttggagcatagatgctcagaattgagagttgatcttggaagattttacctttgatgaatatgaagtggccctctttgtcgtttttgagaactttgggtaagaagtcgattttatttgatattaggatggctgttccagcttgtttctttggaccgtttgcttgaaaaattgtttttcagccttttactctgagttagtatctgtctttgtccctgaggtggatttcctgtatgcagcaaaaggttgggtcctgtttatgtttccagtcaggtagtctatttattggggaattgagtccattgatatgaagagatattaaggagacataattattgcttcctgttatttttgttgttggagttgcgattctgttcttgtggctgtcttcttttaggtgtgttgaagcattactttcttgggtgtagtttccttccttgtgttgaagttttccctttattatcctttaagggctggattcatggaaagatattgtgtaaatttggttttgtcatggaatactttggtttctccatctattgtaattgaaaattttgctaagtattgtagtctgtgctggaaattgtgcacttttattttctgtataacatctgtccagggtctgctggctttcatagtctctggtgagaattctggtataattctaagaggtctgcctttgtatgttacttgacctttttcctttacttcttttaatattcgatctttatttagtacatttgttgtttggattattatgttgggaagaatttcttttctggtccagtctatttggaattctgtaggcttcttgtatgttcatggacatctctttctttaggttatggaaattttcttctacaattttgttgaagatatttacttgtccttgaagttgaaaatcttcattctcatgtataccttttatccttaggtttggtcttctcattgtgtcctggatttcctgggtgttttgtgttaggatcgtttttcatttttcatttactctgattgtcacgtccatgttttccatggaatcttctgcacctgagattctctcttgcatctcttgtattctgttgctgatactcacatctatgactcctgatttatttcctaggatttcaatattcagagttgtcaccctttgaattttcttgattgtttctacttccgtttttagatcttggatggttttgttcaattccttcacctgtttggttgtgtttttctgtaattctttatgggatttttggttttcctctttaaggatttctacctgtttagttgtgttctcctgtatttctttaagtgagttattaatgcccttcttaaaatcctctatcagcatcatgagatatgattttaaatctgaatcttgctttttgggtgtgttggggtatccaggactcactgtgttggatgataccaatggttccgatgataccaaggatctttggtttttgttagtaagattcttaagtttgccttttgccatctgataatatctggtgttagatgttctaggtgtctctggctggagctttttcctcctttgagtctgttagcctctgtcagcactcatgagagatcaactctctcctgagtcccaggggtcagagcactcactggaggccaactctcctctggcagggaaagtgcacagagttctgaggatcatctctgcctccttgatgaggatgaaggcctgaagggaccctttccaagtagctctgttgcttctgtggcccatgcctctcctgcacatcccaactcagagagactccagagagaaaatgagtgtgagattcttaatttatcctctgttatatgaactgtgggacttttggtaagaatactagcttttgttaccaaagtgaatttgtattaggtagaattatagtatatatacagaaacgaatattcgaggtgataatgaacttgagccctagcttaggctcataagaagtatctccattcccttatttgataggaataattctcagaactgcttgaggttctccctaaatctagatattttgtgtttcttccctccccgccccccgacaatgctcagtccttagccttccttttcaaaatttcttttttctttttacagtccaggcattgccctctcccagtaccccctctctcagttcctaatcctgttcctcctctctcctgtatccaagaggattagccccccacccccaccccaccaggcctcccactcacttggtccttaagtttcttcagggatagttgtgtcttctcccactgagtccagaccaggcagtcctctacagaagcatccatggtctttttattttctttaaaatatttaaacagacgacattcatgaactgaatgttgggaaatgttactattatccaaaaggatgctaatcacaattaaaattatgaaaaactagtagtgtgagactatgctagggcctagcaaacacagaagtggatgctcacatcagctattggatggatcacagggcccccaatggaggagctagagaaagtacccaaggagttaaagggatctgcaaccttataggtggaacaacattatgaactaaccagtaccctggagctcttgactctagctgcatatgtatcaaaagatgacctagtcggccatcaatggaaagagaggcccattggacttgcaaactttatatgccccagtgcagaagaatgccagggccaaaaagtgggagtgagtgggtaggggagtgggggtgagggtatgggggactttttgggatagcattggaaatgtaaatgaggaacatacctaataaaaatatttttaaaaaattaatttttatttttagaaaatgtattcatattataaaatctattttcaaactaaaagccatgccaagatgattgtgacatgttgccgatatttagtctcagtagacacatgatgaaaataatagtatgcagttagctattatacgttcatattattgtattttataggcattttaattgtaaaatttggatccttaaaactctatcattgtgatttccaatgacaaggggagtgcccagatacatcattttcttaggattttactgctgtaaacagacaccatgaccaaggcaactcttataaggacaacacttaattagaactggcttagagattcagagattcagtcaattatcatcaaggtgggagaatagcagtatccaggcaggcatggttcaggaggtgctgagagttttacatcttcttttgaaggcaaaaaggagaagactggctcccaagcagctaggactcggttcttaaagcccaccaccacagtgatacacttaatccaactagaccacacccacatctcctaatagtgccatttcctgggccaagaatatacaaacgatcacaaccatgaagctttataggtagagagcagacaactaccctagctagggtatgtacacaaatcattgacacatgaaaagcaaattgaaaacaaacatgttttattacatattttggtatcaacttctggtatatagtacatgtatttttctcatttttcatttatttatgaatttattaagttagggttcagggacaacttatagaagtcagttctcttcttctaccttttgggatttgagagtcagtaaaacacacacagagagagagagagaggggggggagagagagagagaatgatacagtgtgctaaagcactatacagaactgttgttcagcattggacatggtatcctatcacatcttccctgctagaacaaaggtcaaaattcaaattcaaattactgctacaacagaatgattctcattttataccatcacagacttaggatcttctttttggacagagttaaacttaaggaaaccaagagtttcaggtttttctttattatgaagactttgtggaaaaatgacttcttcctttctcatgaaatgaatcttgaaaatatgttttgcaatgctgtataaaatttttgatttggaaaaaaaaaagaaaaatattgtcatggtttgaatatacttagcccattgggagtggtactgttagagttatggtctttttggaggaagtatgtcactgttggagggctttgaagctctacctagtgcagatgagtcagtcttctgctcactgctatgccttctgctttgttgataattgactgaatgtcaaaacttgtaagacagccacaattaaatgttgtcctttataaggtttgccttggtcatggtgtctcttcacagcaatggaatccccaactaagacatatatagcattcagttcagaggaagtagtttatgtacacatatattttgtgtatcttttgttttatcaattttagcaatgatgttttaaaatcatcttatataaccatcataatgatttttacctcttgcatgttcaaacttttgataagtaaattcctgtccataagtgaattggaatgtttatttgcatttttatttatttcattggttgacttataagatttacaagacattacttctaattattatgaaatttttgtagtgttagtattggtgacacatgtatctgcaagatgcgtggaaggtatgcactcaaaaatgaatatgtgaggtaaaagaatagcttcctggagccagctgtgtcctcctacctttacttgatttcttgggatggaactcagctcacatgtttgctaggtttgccttacctgctgagccaccccattaataattttcaattattaaaattgtatttataattatctgtctgtgtacgtacccatacttctgttggtacttgggggctgtagttcacatgtggaagtcagaagacagatttttaggagtggattccttttttctactttgggttctaagagtgaactcaaatcatccagtttgtgctgtgagtgctttatacactgagacatcttggtttgggttatgatttaacttagatttattttttcaaaaatttggaagtttgtctcaagtaagtcatcacacattttcttttaatttctttgttgctacatttttactagaaacaaaattttcaagtgtcactagagcaaggaccatacaaatagaaaaataagaatgtacttacatgcgaatatgcacactaaatagttatgaaccaagttgttcatgatatgtatggctcatattttgtttaaaattgtggcaaaatctgagtgacaagaatgtcagatcttcctgcacaagacaaagatgtcatggcgtttataaacttggttacaaaagaaatggataaaaggtaaactggaggaatgggtgactggtaagagcacaggctgcttttccaaaggactaagcttcagttctcagcacccgcacagagatttacaaccatccttaactacagatgcaaggtctcttgttctggctgatatgggtactaggcgtgcatgttgtgcattgataaatcatccatacacatattaaaacaaaataagatatttaaagtatgattaaaaataaaataaggaaaaagcagctgcccactagttctcacatgtggtgtccaaaatgttgaaggtatctaaggaatatccatgtggtaaataagtaaaaaattaagttatttttattgcctgaaagagtgggacatgcactaataggtcctttcattattgcacaaattgggctttaatttgtgactgttgagaatacagcacctggccagttatcaatttgtttttattgaacataataaataaaaacttcacattaaaaacactatgaaccatcagcactcggagacattctcatcaagtgcaagtgcttgccatattaacccttgaaattattacctagattagttctttgaacataagtgctcactatttcttttttgaatgaatggtagtgaagttatctttttttttttcattttttattaggtatttagctcatttacatttccaatgctataccaaaagtcccccatacccacccacccccactcccctacccacccactctccctttttggccctggcgttcccctgtactggggcatatatataaagtttgcaagtccaatgggcctctctttccagtgatggccgactaggccatcttttgatacatatgcagctagagtcaagagctccggggtactggttacttcataatgttgttccacctatagggttgcagatccctttagctccttggctactttctctagctcctccattgggagccctgtgatccatccattagctgactgtgagcatccacttctgtgtttgctaggcccccgcatagtctcacaagagacagctacatctgggtcctttcaataaaatcttgctagtgtatgcaatggtgtcagcgtttggatgctgattgtggggtggatccctggatatggcactctctacatggtccatcctttcatctcagctccaaactttgtctctgtaactccttccatgggtgttttgttcccaattctaaggaggggcatagtgtccacacttcagtcttcattcttcttgagtttcatgtgtttagcaaattgtatctttaaaacactcaacttcatataattgtctcagctaaacatatgcataaaggaacacatattaaaatgcaaagtaatgaaaaatatatttcaatttaataatgaatgtttttgaaagacaacaatagtcatttaaatttaaattgatttgaattatggcctgtcagttgtatgccaagtaacactttgaggtctaaggagatgactggttcagttcctcaaggaggaatttatgccagtgataagctgtttatatcatcaatgaataaaacgtgcagtcagaaaatagtgaagattacagaagagaaataaagcactcagatctgagtaaaatgaatagttttgttattccatttgtgctttgatatctaattcacacatcatactttaaaatttttacaattaagtggtaaaataaagccccctgacccattttctcatgccccattatggtaatcagaacagtggtgtgtttgtttgcattgagttaccttctggacagttgtaatatgtctgccatctgcatttataaaatgttcatgtgcatgcattcaccactataattttgaaatgcagttcctaaatgagtggaaattatgaaactgtgctttcagacagtagggccaacgttaccaccatcctcagaattagctgtgtgtacaagctcctaagatcctgctatttaatagctttgtcctgaagagttatgaaattgtaaaatgtacaaaatatcagtatgtttttaatttgccatataaaatttagcacttggtaaatgtatcaaaagacatactccaatagttttacataactactgctcaattgaaaatggaaaacagtatcaatatttcattatgtttctgctccattaattaacagctacatatctcattcttttcaacaaagtctttgggtcttgtgaactatatatctgtaaatctgagtttctggtaatcatttaaaggcctatggaacattcatagaagaaaaaatataacactaaaattagtatctaagatctattatctcttcaataataatttaaattttaatcaatttttatttagtatgtagatagatattttacctacatgtatatctgtgcaccaggtttatgccttgttcctgtggaggctagagtaaggatttatattctctggagctagagttggagatggctttgagatttcagtgtgggtactgggagaggaacttcagtcctctgagccatctttccggcactcttaatccaatcataattttgcaaacagtattaacaatttcataggatataaaagaccattcagaaaataaaataagatctattgtaaaacagtattctctttctttggtttctgaggacagggtcttgctatatgtacttgctgaggcctgtactttgcattgtaggtcctgcatcatcctcttgaagctggtatcacaggcatgcaccaccactcttgctgctgtaatattatacttaaagggttatgataaattttaatgcaatattctttttgtggatatatatacatatatatatgcatatatacatatatatacaaacatgtgtgtgtatatacacacacatatatgtatatatgtatatgcgtatacatatatacacatgtggacacatatacacacatatacatatattacatatatacatatatgcacacacacacacacacatatatatgttacacctactgatgaacctctagtagtctcctgaataagtctgaacttaaattattttcaactcagtccatggtttataaacttcctaacccttggacttttattcccgactttgtttttctgaagccttcatcgcgtaacaactcacacagatgttttaatgccacattttatctatgggagtttgtggcctgattgttgtttagttggcttgcattagaatcaccccataccaccctcctcacactcatctgtttttaatactagggatgatctcatggctttgtgcattttagacaagctctatacctccaagctatatccccaattaaaattttcatatctcataacataataggatttgttctctagtgctggaattcatgatgaatcctgcacatatgctacttaatttatgaaaagagaaaataccactgcaaacctcaaacacctgtaattcgtgtcatgaaaggactcataaaacattgatgtttttattccatgaaagtccacaatgtaaatgttggtctcatcagagaacaaggaaaagacatgggaagtgcagaacaatgcttgctgcaatggagtgatcaaaatcacttcttatctgtgttcctaaacacaaatgatgtgtcagatgaactctattcatttttaactctgaatttacagctttaggggaaatcaatatcagcaaaaccaaaattatctaatcagtctctattgtaatactttcttttgtgcatatatgtctgtgaatatatatctatgtatatttctgcgtgtgagattgcgggcatgtgtgagtttgtgtgtttatatgtgtgtatatgtatgtatgtatgagtttgtatgcataggtttgtatatatgagtatgtatctatgtatatctgtgtgtatatgtgtgtatgtgcatatgtgtgtaagtttgtgtgtgtgtgtgtgtgtatgtgcatgtacatgcaagtgtatagtactcaagatagaaacttaggcctatatattaggtaagcctctaaacttgaagttacattcctatcctaggagaacatctctaaattattgaatataatttattttattaaattgctgacataaagtattttgagaacatgccccccattccatgctgctctctcctttcttgtgtctctcttttcaagagagtcgtctctattttcttaacagttttgcttctatttttcatttcatctgtccatgtatgatatatacatacttatacacgtacatatatcatatatcacatacgtgtaatctaaaagccacaaaagaaagaaaatgtggtatttgtttttctcggtatgtattaacttgctcaatattatcttcagttaaaactgattttttgttttgttttgttttgttttggcaaatgaaatatttactctcccttacaaccagaataaagttctctctctctctgtctctgtctgtctgtctgtctgtctgtctgtctctctctctctctctctctctccctctgtgtgtgtgtgtgttaagctacccttatttattccttgttaataaacaaccacggtttctaaaattatatttaaaactagatttacattctttagtgttagaaaaatatgtcaatcatcaaaatatgctctaagtttactaggccaaggaaatgacactggctatttgtgaagtggtaactgattgacataatacacagtaaaaaaggattttaacagtagagaaattaacataggtgtaaatcagtaataatattgataaatgcctcactgagaaagtgttaatgttgttgtatagctactaaagagaagaattgctatcaatctacagcaaaaaaatcccttaaagattgggaataatatacagatcctgcatttgtaaagtttatttaacatttttctggaagtcctagacagtgcatacaagaaagaaaagaaaatacagttggcaaagaaataaataaaattatttccatttatagataataatttatcatgtttattatattgaaaaattataaaacaaaaatggtggctgataaatatatccaatggcttgtgagattcaaagccaatataaaaataatttacattcctatatattaataatgaatttttagatgtacaacactaacataataatagagacatagataaattggaatgactagaaccaaatcatttatggttaattaactctgataagttaaagaatatataagaaatatagcctcttccaaaatctgtgtcaggaaactggaaaatgccaagcaaaagaatgcaactaaatatctgcttgaaaccatgtaaaaataactcaaaatgaccaatcacagaagtgctgcagctgaaacaatcaagctgaatgtggaaaacatgactttaaatctctgtgacctgagagcagagtcaatccttagatagaacatgcaaaggacaccaacaaaagaaaaatatgaattatactaatagaactataaacttctatgctttcaaggacatgaagaaaagtgagacagttcacaaattcaagagatgccattttcaaatcataaatcaaaagaaggaatctcattatactgccctttttgttgtcattatgaatagctggtgtttcatgagaatatcttattacttactaatctgtatgtttttattcataaatcactttaaaacagtttgatgtgtaaaagtaaatatgaattcaataacttgttactctaggattctacctctctacctcttatattcacacattgtcagcaaagctatttatatgcaatccatggcttaatatgcaatagcaaaatttttgaggtataccaactgtctattcaaagaacataaaaacgttcacagttcactaatatataaacatttattaatatatagtcaaattgaacatgcaaattgaaacagtttattcgtactctagaactgcaaagcacatatatacataatatatcacacagagtacagaccacatatgccttaattagggtttctattgctgagaaaagatacatgaccaccatgataaaggaaaatattttacagtttcagatgtttagcctattatcatcatggcaggaagcatgctagatatgctgctggagaaggagctgagagttctacatctttttttgtttgtttgttttttttaaatatttttattaggtattttcctcatttacatttccaatgctatcccaaaagtcccctatacccacccccagactctcctacccacccatgcccacttttcgaccctggggttcccctgtactggggcatataaagtttgcaagtccaatgggcctctttttccgttgatgaccgactaggccatcttttgatacatatgcagctagagacaagagctccggggtactggttagttcataatgttgttgcacctatagggttgcagatccctttagctccttgggtactttctctagcttctccattgggggccctgtgatccatccaatagctgactgtgagcatccacttatgtgttcgctaggccctggcttagtctcacaaaagacagctatatctgggtcctttcagcaaaatcttgctagtgtatgcaatggtggcagtgtttggaagctgattatgggatggatccccggatatggcttgatctgcaggcagcagaaggagattgtgtgccacacaaggcatagctacagcataagaattctcaagcacacctgcacaatgacatacttcgtccaaccaagtcccacctactacaacaaggccacatctcctaatagtttactccctttgggcaaagctttcaatcacatgagtctatgagggttacacctatttaaacaacaacagtttatataataaatatagacattttctagagagaagcatagcaaatgaaaaacagtgaggcttttcacaatggtgccactagaaaagacagaatatggtcttaggtatgaacatttcctaagtatcttaagaaagcttttatgtcaaagagaaacattagcctagagactttgacattaaatatctatatttgagggggtttttttttttttttttgtatattagaccttgggcaatcacctaaactttctaaatcttattttcatttctgtaaaataaagatgaaaagtaatgttgaccttcagatatgtgaatgctgaaaatccaaagaacttgttaaatagcataaggcttgacatagggtggtcatataatcaataacatgttagttttactgttaatggcacaacagcacgtcagatgattgaatatatgattttcttagagttctatgaaaaaccttgtcaagatatattagtggtgactgatggtcccaatgaaaagttcctgtccctggtttcctgagaacaagtatgtgataacccttgtttgcactatgtgtaatctgttattttctaagtctttacctaaggttgagttttgtttttcctatgctagagctgaaccagtgctgtttctataaatctctctctcactctccctctccctgtccctccccctccccttccccctccctctccacctccctctctttttctctgttttaaattaagggattttcgttttgttttttagtaaaagaccacttgaaaccacttacagcagtaatgttgagagctgtggaggaagtctaggtgtgccagtgggagtaggtcatctatgacagatggcatggaaacaactataagacattggtaagaatgagaaatagtttaaagtccataaacaggaaattccatgtcacctaagggcctagggaagactctagcctgttttctgaatatatgcatgtaaatctcctgaataatcctaacagccaataaaattcaaggcatgatcaggaaagaaagcaaaaatacaatcttaacctttgtgttataaacagtatttttgcctttaaaataccaataacagttataggcattaaattttaagtaagagatagtcttagaagtgggattcctataccaaaattatgactgttttaacagcttattccatgtgaatatatgacaccccccaccctggattttcaagaatgaccatcaccactataaattatttgaattatcacaggctatgatatacacatatgaaattatttaaaaattagtaaattttcaaggcattatggtatattttgaaattaacatgttataattattacaaactcaatattctccagtgttggattttgatatgtaatttccatctaagttgtgcatttatgttcttatactagtgacaattagtttattatggtcttgtttttactacaaattaaaatagttttttgcttatgagcaacccaggtattttatagtgtgatttatgaaattagaaaagcttgtttaaagagatatatcatcatatgtcacaaaacccccctttttttatcaacaaagtcttttgagaagagactcagaaagtcagtggaggatggccctttggtaagaggaaagaaagacattttggcaggtgctggaaggaggaatagcaaagaggtagaagacagttgtgatttctgagttagaacttagaaagtggacagactccttcatgcacgtctgaatgccattaccttggaaaaagccctggcacatataagtccacttcttattaagaagttagtaagtctgcccatttgctcatcatgtcctctatgtatcatttattttacttttaagattttgcttacaatctaagaagctaaataataaaaatgagtttctcctttaaggtatatcttttacaattttagattaggagaaaatctgatgtctatcaaaaggttatgtattatctaccactgaccaaaccatttataaaggcatcagagggtgccaatacactggtattcatatgttccaaaaggagatccccaacattagtctcccaatgtggatgttacaaagagtgttatttaccatggaccatgactttgttacaaaggatgaagatattgatattcaaatttctcaagtagtattgggtgtcaaattgcttttcagtttctttctacctattatctcctatacaacgtcccacaactcaaggaatatggaccatttaatcttattaagaaggacagatatcattcttctggatctacttcctgctgtgtaagattatagcacacccatggagagatgcactccttggtaactaaggagtgtggccactgccttgcaaaagttacaatcttgcttcttgattcaaaggtactggcagatgaactgtacctctgatgaaaatttctagcatatcttgatgtaccatcacctggaaatggaatatttggattctggaaagaacaaaatgtactattatgttgacaagccatgtctcataaaaaatccacttagaatatagtgaccagagaggcccaagttcagaaaatccaagaaaaattaaagttaaaactctaacagccagattataattgggaccatgtccctggctatgtttctcaaggtataccctagattataaatataaatgtcagtctctattgttcataaattgttcatattagccaacaagtagtttttatggtctttgctttgagacaaggttaacagtataatcctagttagccaagtattcactatctagaactagcctaaaactcacagaaaatctcttgcctctattgtaagagtactggagtataggtgtgtgccgcaccacccaaagactgcagtttgctatggtaagtggtaatttaaagctaactgttatagatgcctctagttggtgattcaagggaggagtttttggcttatattgcctcagtattgaaggaaccaaagtggtcatagtagagttttataaagtgacttcataatgaataaacctattctaggaggttgtagattccagccaaaattaattcagttttcttattattatgataggagtgatatgcacagaaactggaagagtcctgtgacccaagtgatagatttctttacactagaaacctgaagctggattaggctatgggaaacaggcctgatggaaaggtagacttaaataccaatcccataagatcaccgagaggtaatgattcctcagaataattcaagcaaagtaaatattaagccaagaaaaaaaaaaaagaaatacacctggagcttggtttgagagagccaaggggacttcctggaattgaggaaatctttgtgtccagtttggtctaggtctcatttccagtgaaagtgtttttcccctaattagatcaactgggtaggtcgatgcagtaattaccattgttgggacaataccagtctaggacacaaattaccaattgctgaaaaactatacattggattaaaatataagaatgaacttgcaagttccatgggtcacaaggatttggggagataggaatgatggtacaattaccctattgccttggctttgttaccagaagaaatagccaatgcttggccttagtactgccttgaaaaagggatagaaagcatatttaaacatggcaggttaatatattccaattgtccggtgataccatgaagatcccttgggtcttgaaacccatgggagtaaggagtatgtactgaaatttggactaaaaatagaagtagtgtggtttggttttgaggatgaatacaatgtatcaaatactgatggaacctttctcaatcatccatcataatagagatgatgaatagaaatggattcctcttttgacagaggacaggtgtgtaccttaaaaggttatcgtggtcactcactgttccaaggtcatcaagagaataagtctaaatgtagcactttgaatcatggcccatagatatatgaaggattgtctttggggtccatgtttggaaagaaacccaggttctcagctggttctaactctgggtagaattctctcatattttacctggaacactttttaggaaaggacactttttaatctgtacaggtttatttaactacaaatacactggaatttgaaaagagtttgtgaacttagtaagactttaaaatggattaaatatagattttgaaaagcttctgagagctggaatcagaacttttatctctattggtcaagacgccatgtacctatgttagaaccttttcaatgtgtcagtattcctaaatactatgcccactgatgttctttgagtactctttgtgatagctggtcaagtgctcaggccctttctaagtccagtttggctccttttgctttatcattctgctgtgtagtttttctgttgggtgtttgagtacatgtatgtaagcagttaaaaatgagggctttcctgttgaaatcagtccaaagctccctaaaggatacttttaaggaggtaggataagtttcttggctactttggcttctttatacttttgttttgttttgttttctgtaagttgtggcatctattgggataggtcaaggatttcctgatcatgtgacattccttgaaaacactgggggcattttcatctttaatgatgctccttttacagactcttcactggatagagtcaagtgcctgaggtctttgaaaggtctttgatcatgtggataggtgccttaccagagtacaaagaccctgtaaaggcacctcactatcctctgggacttaccttgtacatgggggtaagggtcaaggaaaaaatattggctcacctctttggccttttatattcattgactttggtctccatgtcgcactgttgaataccaggagatcagaggcaaaggaaacaaaaaaatgagttctagcttttagataagcttagtaatttggcacctctagctctcagatgtgtactcacttttaatcacatacacaacctcaaattatcttgatgacctaaaataattgtcatgttgatttgtgttttatggctttgatgtttttataacaaatttatattattttataagaataaatattttattattgtataagaaatattttatttcttactgctaagcaaccctcaggtctcacagtaatttctatatgaaactagcttaaccttcttatctgcctgattttataatgtatggtggggtcattttaattttatctagtaatatagatgattattgagatttttaatcaaaaatcttatattcaactcttttttaaaggtttatttattattataatatcaagtacactgtaactgtcttcagatgcaccagaagagcacatcagatctcatcactgatggttgtgagctaccatgtggttgctgggatttgaactcaggactttcagaagagcagtcagtgttcttaaccactgagcaatctctccagtcctatattcaactcttaacactcattttcttttactgtcactaaaaaatttcttttttgaaaaatgtatggctgttttatttgagttttgagaggtttttcactctcctctgttgacattttgtaaacatgtttcaggttttgaagacagtcactaacttcagcagctacatttttaagtggttactgatttgtaaggcccgtgcttctgctaacttgatggtggacttttgacaagtcctcctgcttctttgtttcctcaattctaaatgaaatgctactttttgatgtctctaagctcctgtctgtcctttctgattcttttatgctcagtgtcccaggcacaccattaccatatgtaaatgaatcttcatgtatcattttctatcccttagagtcttcctattcatccttcaatattttccaaaaaacaataactgaaagattatttattcactaaaatgaaaacaaagctgtagcaaaatgttgagaaccactgatttaattttcagcttttaaagtttcagtttccgtgctctgaccttaggaaatgatagataacagccatattgcaaatctcatgggagctgcaaaatactacccaatactggggtacaagtatttggtagctcttcccactttttaaataaagcttgagatttgttgtcagtgttgaggaagagtgtgatggatgcattttcactgtctagtaagagtttaagtgctttgtgaaaacataagctctgaataattaactttgcttaccagtcagtgattgaaaaggaatgaccctcgacaatctgtaataaataacaaagcacattttaattaaatttttattgggcaagcctgtccccacgaatttacttggagccaaaactaaattcttaaaattggttactttagtaatcatttttttcttgatgaaaatatgcattttacatttaagcaattctgtatgtggttttaagcggattatataaatatatccatatatatgatattttatatatggagacaattgtagattttttttccctacagctgcgtaccaatcttctagtatagtataaagcataggtcagaaaataaataattgtagccccgaaacctcgaagatttgtttaggatctgggtttgaattatagttaagggaggggagatgatacatacaggtgagagagagttaatggagacaggaggagttgaagtgggggaaggtatgtggtagaaagtgcaagtaaagtcctcatgtaggaacatcacaaaagtaatgaactaaatgtttacatatctgggtttgaaagttcatcgacaaaactaatttgataaaatcatgaattcaccttcaaagataataaaaacaacgtgatctctccattttgaaaggcttcataagtggatctcccaagcaggagccccgttcctccagttgcttatttatcttatgcttgaactctcccctcatttcatcctttccaataatactgcactaaagtgaatctctgattaatatttaaatgcacatgggaagaaataggtaacctaatcagaggaaataattaacaagccagctcattctcattccttctcattcctacaaggaagcatgtgtcttgattgccacaatatcattccctttgacctcctttctcagtcaaagcctaataaagttgctgtttgaacagtcagtgacacttcattaccacttggatatattttctgaatgtgctgcatgtactctcattcccctctcttctatttttctttgctcttataatactaagaagtcaccagtaggaattatttgtcagctcctggtaaattttgtgatagaattcaaatcgagagtcccctaacttaggttcaaaccagtgaaataagattgctgttgctggtggaaataaaaataaaaagcttttatgcaatgtccaaaatgtgtagtatatcctttcatgtaaatggagggtgacagtttggatctgatgttgaatgctacaattttatttgagatgaaaatttatataaatgaaatatgcatacgcatgtatatagatgtttatttgactgtataggatatatactcttcattcatatattaggaatcatagattataatatacacccatatgcaattctgtctatttatagccttgtccacactgtattgtcctctagttctgtgttctgtcactggagagtagtgtttgaaaaggagggaaagcttgatgttcaaatactagggttcaacatctgggccttacatgttctaagccagtgttctattcatgagccatattatttgttttaattttaataaaaaataacacacggtttgttttttaaaaaactgagattgaaattgcttttcttgattttacttttatcttttgagatggactttagctatgtaatccaggctagcctataactcccgatcctcatgtctccgcctcctggcttggaaacatcatgcccagccttatgtgtagaaatttctaagaaaaaaacaacacattaatagaaagtagaattattttattattatttataagaaaaatatttggggattgacagaacaaatcaaacctgttgaaaaatatttaagaccctaaataggattataggatactacctccttgttgacaaccatgtatatatatatatgtgtatgtgtatgtgtatgtgtatgtttatgtgtatgtgtaaatgatgtatatgtgtatatatatatatatatatacagagagagagagagagagagagagagagagagagagagagagagagagagagaatttttggcttaagatccctagttaatcaataacagaattccagtgggggctggtatagaaattgcgttgagtgcctaagatcctaagtttcattgccaccaacacaaggaaaaaaatttaaaattaaaatttaaaaatgtgaccagagttatactgtgtgacataccagtgatatactagtgtgacaatattaatttaaaaagtaatactaaaggaagtagatattttaaactgttgcacaaataatatacatttaaaattatttatagactcgggaaagaggatttaacagttaagtggacccttgggttcagttccagcactcacatagcaggtcacagtttttgtaattccatttccagaagatcccttatcctctactggactccttgagttcccgcacacacatgatgctcataaactcaagtacgcaagcatagaatgaagaaattaagaaaaatatcttttaaagtatcgacagaatttaatattaatgattacacacattaggtgtaaatagtaatagtgaatggttgaacgaatgactggtgttcactgtaatatttaactaatagtagtgattgctccagagaagaatgcttagagaagaagtccattacttacatttgaatgttttaacagaccatgctggtcacagaagtttggatcagttgcaagctctgatcatagataatttactctcttcacctgtaacactaacttgatatcattttacttcatagtttccttctgaatcttattgtaaatcacttggtcaactccagtgatttcagagatctgtgaatacagaaaaacacaagaaatgtattttatttgtaaacttttatatcaagtgttcactgtaggggctgagagatagttttgtcagtaagtgaagccttcgatgtttgagacctgtgttcaaatcccagcatgacataaaaggtgtgtgtctctaataaagacagaaaaaggaagaacccaaacctcattgggctgccagcctattctaatcagcaaatccatatcaatgagggaactgcctgaaaaacagagtagttagagaaaacaccagatatcagcctctagcttccataaggacacacacaagcatacatatcctcatgggcagtagggtacaagtgtctgtattatccaatgtccccttggttacagctggtggtcaaaactctctccttgttgacaaccagtgatataatttgatgttttcctaatatatcatgaaattttggttgatttttgtttcacatgttaatgtgaaacagaattatagcatgtgtgtattattaaaatatttccactggaatttgataatttttgtttgtttttaatatttatttatttatttatttatttatttaatgagacatggtttctctgtttagctctggctgtcctggaattcagtttgtagaccaggctggcctcaaactcagaaatccacctgcctctgcctcctaagtgctgggattaaaggtgtgaaccaccatcactgccttttgtattttttgttttgttttgttttggttttggtttttttgttttgttttgttttgttttgtttttttcttttttttttttcttttgagaatcttgatagcattaaagaacaaagcctttgccactaaaagagctcttctgagttatagctccctgtagatagtataaagggatcattgaatcctcaagtcagtatgtatgactatgtatttctcctccctgttctttgtccaaaatgtgtacatatataagtatataaatataagtatagaatcaggaaatccagataatgtggttcgtagaattctgaaactattttgtattatttaaataatttcttctttccccagacatacattcaaaatatttttagctatataataagtgagttattttactatattatggacttcagtagagagtagtagtgaggattaagaaacattcctgtggactttgcctataataatacaggcaacacaataggaaaacattaatagatatttcatatgggctgcctccagttggaagagatatttctttaagatatagtctcacaatagattaatattttaaacttttattgagtataatatagatacagaaaaaccataagcatatagcttgataaaatttcacaactctacacacccaagtatctgacaattaggatttaaatatagagatatgaatgtcctttaagtatctctatgagtatgcatttgaaactaattattggcacaatttagccaataatctgaaactattgtatgtcctaccatgtctttctcaatagagagcaaagaaaaaatattgctagctgaattggactaacagcatattttttaatgttctataatgtatagatatgaaaacctgccctataagtcctcactgtgcacaatgttcatgttgtagttgttaattttttattaaaacaatgtaattataaaatatgtattttaggagatggagagactgttcattggttaagaacattgctcttcaagtagaacaaggtttgattcccagcacgcacatggaggttcttaaccatctataattttagtcccaaaggatctaacacccatttctagtcttctcactttacattcttcataaacaatgttataatttcaaaaccatctctggtactcaggaaaatatgagatgtaccacttaacaccacatcctttaatctgaagacttctccaaactgccctaggtcattgtgttaacctaaaaaggagatttgtatttacaatggaaaacatttgtattacaatgaaagaatgtgtgaaaaaaaaggtgttaaagagggatgaattatgctctcaacaactgagattcaccactatgttttgcagtagagcaatttctgtggtaaacatttggatttcttttcaaaacgttagtgttttaaacatctgagatttgaagggaagactccaacagcaagttgagctactttggggtatgcatgctcatggggatgcagaagacggagaaagaaggtgtagagggaaagaggagacaacatgattttacatagaagtcattgaaagaagttaatctgcacaatttcaagggaaggtagcagtggtgactttgctggcccatcttctctgtgaatgcctcttagtcctcacatgataattcatttgtcatcctcaggcctttaagagagctgtcagaatgaacaaatttttaatccaagaaaactatgtgagaaactgaaatcaattttttatacttcttctttttacctttttactcatttctattttaagagagcaacggaatgggagggtgctggggagaaagacagaatgttgctggtatgatgtttgcctagtactcacttctgatttgctctgtacaaaaaaaaaaaaaaaaaaaaaaaaaaaaaaactttatccctagcactttggcacacatcttatttatagtcagtgaatttgaagcttttgttgtttcaaaggtcaatatttatttatgaccgaagatataaatgttccctttttctttttctccttttcttccattctttctttctgtttcctgccatttattctctttctttgtttctgccctttctcctttcctccctacatctctcctgtcttccctcttttctcattcattcctagcacacagcttttcttcctttcccatagggagaacagttagaacgtagtatctgctatcacatgtgtatttatcactgaaaattaaattgccccaatgaatgtgggtgtaactgagtgactgaacaaacatttcatgtactgtcacactgtcacagtccagtattacatttctgtttgttctagggttttggtctttctttttccttccattattattatatttttaaatggaacatatctcactttgtcactatataatttgagttggctttgaatttccattcttcctgcctctgcctctaaaatattaaaattagaagtgtgagtcatcaggcccagttcagtgtgtgaactcctcctctttctctttctttcttccttcctttctttcttccttcctttctttctttctttctttctttctttctttctttctttctttctttcttccttccttccttccttccttccttccttccttccttcctctctctctctctctctctctctctctctctctctctctctctctctctctttctctctctctctctgatatatacacaaaagataggaacacttgatcaagctctctcacatagctaactatgaacagaagttacttttactaatctgtttacttttcaacatattttcactttctctgtacttaagaaatggtgtcttgtctctactgaaaccaatattgtggggaatagataaatacaacattactatgaaattctccaagaaaggtatgataccaactcagacacatagaacccatacaggaggatctgcatagcccatccatatgggcctaaccctttgcttccccaccagggagtccatcccataatcagtcaccaaacacagacactattgcatatgccagcaaaattttgctgaaaggaccttgatatctctgtctcttgtgaggttatgccagtgcctggcaaatacagaagtggatgctcacagtcatctataggatggaacacagggcccccaattgagaatctagagaaagcacccaaggagctgaagtggtctgcaaccctatagttggaacaataatatgaactaataagtacccccagagcttgtgtctctagctgcatatgtagcagaagatggcctagttggccatcactgggaagagaggccccttggttctgcaaactttatatgccccagtacagtggaacaccagggccaagaagtgggagtgggtggataggggagcagggtggggggaatgtataggggaattttggggatagcatttgaaatgtaaatgaagaaactatctaataaaaaaattttaaaaagaaaaaaaaaaagaagaaatagtcagttgcttgacattcgttgttgggtctaaaactaggtcctctccaagagtcatctctccattcccctaacttaaatagcaaataaagaacaacatcaccaaaaattcatgttggaaaagcttccacaggtcttttataactgtcatgtgattaaatcatgtactgaggtgttttgttttgttttgctttgttttgttttctttgcgggtacagttgagtgtttactgtgtaactgaagccagcctcaaatttgtgtttttcctgcctcagtctctggatccaaagattatggatgtatatcacaatatatggtaacaatgaagcttttgcatccatcacatttttaatttacattgtctttaatttcctgtatattttgatttatttttttatttttaacataagaatttattgccactgattttttccattattatccttttacttcagatcatattttagactgattaagatatctttacttatctttgtctgtttctttccatttaaaacaattttcaaggaagcttagtctaaatcataaaactattataatatctaatggactgaaatatcatccatcaggcatggtttactcaatcctggctgctcagattctgaagtgcattgccctcctctcctgacttcaatctagtctccatttgcctttcttacgagaaaattgtgaggaatagctagcagcagggtcagtggagattgaccaaagcctggctcagggagtctacaaaggctcttgtacccctcatctagatataagtctaaggatctgtgccagacactgctagggcagcaatcacagtgctgaccaagatatctagaccagtcccactgctttcaaggatagggcatgccaacctaaatgagttgtcctcaacagctcttgtaggcatcttgggaaaatagtaaatctgttgtatgaagctgattttctctattcccaagcccacagagtatctctgggacttcaggtcaagtaaattcacaaataataatagttagaaacacacttaatgaaactcagagaaaggaaacaggctaagcagtcaagttagaaacaaatatttgtcaaggactttctgtagcagacagctgatcatcaacagaagaattatgattaaagagaaccatttattttaaaatactttgtgtggttttgagcttaaaattcaaagaacaatttatagagagtatggtttctatggagattcaaattatggtaaagaacattacagtcaacttctgactgagagcctaaccagacattttacattctttttgtctaagttataatttacttattaaaataaaaacaaggtattaattttactcatttttctataatggttttgtaagcttctttggttattgttttcgacatagggtactgttttataaccaagactagccttcagccagcagcaagcctcctgcttcggtttcctctatgctgatattcaagcaacaatgtcattgatatagctgctgttgtttaaacatatatgagattttaaaaaatgtaatatgaaatgtgaaaccaacttgcttttaatcaggagactcaagatactaaaacaattatctgaatgtataattaatgatttagtttctctttttcaacctccttgtctattaatatattaatattttgccctatgtttaaaattatgattgcaacttagccatgtaaaaataccctgacagaaagcaacttagtgggaacagagaattattcagcttacagttcaaggttacagactatcatatgtagggaagtcaagacatggacttccaacagctagcttcattacattcaaattcaagagcagagagaaatgagtgcagtcatccctgacctcaagctgtaccacagagcaacagtgataaaaactgtatggtattgatacagagacagacaggtagatcaatggaatagaattgaagaaccagatctttgacaaaggagcaaaaaccataacagtggaaagacagcattctcaacaaatggtgcaggttcaagtggcggtcagcatgtagaagaatgcaaattgatccattcttatctccttgtacaaagttccagtccaagtggatcaaggacattgacataaaaccagatacactgaatctaatacactgaatctaatagaagacaaagtgggaaaaagcctcaaacacatcagcacaggggaaaatttcctgaagagaacactaatgggtcaggctctaagatcagctattgacaaatgggatctcataaaattgtaaagcttctataaggcaaaaaacactatgaataggacaaactgcaacctgcagtctctgaactaaggaatctcgaatgggtgagagggcctaaagaaatattcaacaccctaagtcatcatagaaatgcaaatttaaaaaaccctgagattctaccttacaccagtcaaaatggctaagatcaaaaaggcaggtgacagcagatgctggggaggatgtggagaaagaagaacacctctccattgctggtgggattgcaagctggtacaaccactctggaaatcagtctggtggttcctccaaaaattggaagtaattctatctgaagacccagctataccactcctgagcatatacccaaaagatgacacagcatacaacaagggcacatgttccatttttattatagcagccttatttgtaatagctacaagtttggaaacctcagatgttcctcaatggagaaatggatccagaaaatatgttacatttacataatggagcaccacacagctattaaaaacaatgacttcatgaaattatcagagaaatgaatggatctagaaaatatcctgagtgaggtaacccagtcaaaaaagaacacacatgtaatgataaatgggtattaggcaaaaagctcagaatacccacaatacaactcacagaccacatgaagctcaagaagaaggaagaccaaagtgtggatgtttcagtcctacttagaaggggtcacaatattataagagaaggtagagggtgggatgggagaaatagaggagggggggcgaaaaagggggcagaatcaggtatgggaggagacaggtagatgtacctgtcaggaaattgaacagaggtgtgtaccaatgggggatggggatctgggggtagccaccagatagtcccatatgaatggaaaacaagaagctcccaggacccagtgaggatgacattagctaaaatacctaagaaagggaaaatagaacctgtagagaccatacccagtggataggcacaactcctggtttagggatgggctacacacccatttcaaaaaatttaacctggaatttttcatgtctaaaggaaatgcagggacaaagagtgaagcagagactgaaggaaaggtcatccaggggctgccccacctagggacccatccaatttacagacaccaaacccagacactattgctgatgccaagaagttcttgcagacaggagccttgtatagctgtaaaaccctaaaagggtttgccagcaaacagatgcagatcactcagctaaccatcagactgagcatggggacccaaatggaagagttagagaaatgactgaaaaaactgaaggggattggaactccattggaagagcaacaatgccaaccaactagaacctcccaacccgccccccaaagataccaggggctaaaacaccaaccaaacagtacaaattgagggacccatatgtagcagaggattcccttatctggcatcagtggaatgggaggtttgcagaggggaaaactggatggagggcaacatttgaaatgtaaataaataaaatagccataaaaaagaattgaatgcatccatgcaatacttatgtatttcaaaaagctacttctgtctagaaaatggtgttcctcatgctagaatgattctacttacagccattaggcattttatttaagaaaatctcccacagacatggtcacaggtgaatctaattccaaaaatcctatgctgacattatactaacaccttatgctagtttatttcaagttgacatttaaagatgatcacaatagatgtattgatattatgttcacccttcaagtggttttctgtaatttgcagtttacatctctttgcaaggttttattctttaatgttttgtttaatgatatatcttctaaaatcttttcacattatcagaagttaataaaactggatctacaaatttctggcttgatagaatatcataagttatttttaaagaattataattttcatgaacctaattattcataagtttaattttaagattgagtttactcttccctattttctaaagatcattattatataattttccaaaatttatagcaagtgtttaatttcttcatttattgtaaatactagaatgtaaagaagaatgttgaacagtcctagcctttatgagcttataaactcctacagtatcaggcttataagaacagctgtaatgattttacttatgaatttcagtatctttctttagaaagaaaacattttgatacactttaattgtgtatgtttatgtgtgtgtgtgtgtgtgtgtgtgtgtgtgtgtgtgtgtgtgtacatgtatgtgtatgggctggcatatttgtgggtcagagtgcaactctgggacttagttctcacaatcccctatatgggtcctgaggattaaatttagaccatcacaatttttgtagacaatatttttttctgagccatttttctggatctcagtaaactttctttgaaatattatataggtattttcaattctaatgcttgactacatgaattatactacatgaactatgtttctaaaatattacttctgattataattccaacagtatacataaatgaggaaaccagaagaaccatggtcatataccagaaacatttaacattgctgtacactaatataagttatacttacatgttaagaataaggatagtttttaatttccatttaaagtagcactaggcttataatgttacagacatcattttcaactttccattgtaaaaattaataacaatgcaattcaaggcagcattcaggaatcatttgagtgtctatcattcctgttatctctatatcagtaaatcagctctacttcagaactctatatgggtaggagattagataatatttttaatccattttcttggaaaaacaatggactgtcatctatctatctgtctgtctttctgtctttctgtctttctgtctttctgtctgtctctctgtctgtctgtctatctatctatcatctgtcatttatctactcctgctgtgtttctatatatttatgtatctgtgcatttatctatgtatctatcaatctatcctctatcatctatctatcatctatcatttatctatccctactatctatctatctatctatctatctatctatctatctatctatctatctatcatcatcatcatgtctatcatctatctatcatctatccacctatctatctatctatctatctatctatctatctatctatctatctatctatctatcatttatctattcctactgcgtttctctctatctatctatctatctatctatctatctatctatctatctatctatctgtctatcatttatctattcctactgcatttctttctatctatctatctatctatctatctatctatctatctatctatctatctatctatctatctacctctctatctatcatctctcattctctctctctcatagtggtgttaatgatgttggtgatgagtaggacgatgagcattatggtgatgattacttaatagatctctgaagtatgatatttttagtattttaaatagaaatatctagtgattggaaatgttgaactcatgaaacatgtttaggtgcttgacataaatgttatactttaccaaatttattatttgtgtagatcttttattcatatttggaatttaaaagaccaaggcctcaatatgtgatgtatacaatgtctttcccttaattagactcagaaaataataaatttcaagatcctttatgtatcaaataagaaaattaagacaccagtactataaccttcttattagttgtattttttattttttcttgagatagggtttctctgtacaactccagctgtcctggaactcactttgtagaccaggctggcctcgaactcagaaatctgcctgcctctgcctctgcctcccaagtgctgggattaaaggcgtgcatcaccatgaccagcatattttttgtttgtaatggtgcccacatgtgtgtgatgcatgtgtgagagaatgtctgtgtgtatgagagggtgtgtgtttgtatttgcatgtgtgtgttcatgagtatgtatgtgtgtctgtaggtatatgtgtgtgtttctgtgtatggtgtgtcaggtgcctctgaagtccagaagagactgtcatacacttagaaatggacatagagtaccatgagccaggtcactgtggatgttaggaactatggtctctgcaggagttgttatgtactcttaactgccaagccatttctctatcttccctggcctgattgtatctgatgcatcttggatcttatggggcctttaagtttctctctatgattccaacaactagcagagtctataacctactagactgatacgtaagttaggcattaaggttccaaatacttaaagagtgaaccctggtgcaaaagtcaccagctcagctaagatgattagtacatattaggttaatatgcttgttcttaaaatcactatacttataccttgttcatttgttcaaaacatcaaccagtaataagaaataagaactaaaatattatcattttcactgggagtaatgcctatacttacctttactaaatgcagaggaaaatattgcttagttttatccaattcaaatgttgcattagagtgttgttctcttttggtaactaagatttcattgaggaatatggagcagttctttactgtatggcaatatagataatctatttatgcattttaagagaaaagttttaactcttatttattattcaacttcagatacaaaagttcatgtttgttacagcacaatcctttaagctgtttacgctggaatgtacactcagccctgtaaactgctgcgagtttttcttacaccccatatctctttggaagacattgggaactggtacaaactgatcccttccttttcttcctgttgtataatgcatcaggttagtattggcgtgccaccgtaatgtaatcttaatcattgtaactaggtttgctgaggttgcagtgacaacagcgataatactcattgtaaaaagaaaaaaaaaaaaaaagttccaaagcactgcctgcccacactagcctgtgccttctaccagcttactttattttccctgccagcataatctgtatcccagttaataatttaatgttattcaacttcttatcttctgaaaaggagagtctattttgaatcacaaggcagctgaccttgaaagcaacatatatatgttcattcatatatatactcatatatctatatatctatctatatatatatatatatatatatcacccaaagtttcccttgatggatttctttgttacagaggagtttcagtgtacaatccccaatgctctatcaatgctgaatgatatagattcagtatttcttagtcttgaactttacttgtatttgtatatgttgttacaaatcttatggttatgagtaagtagaacacagataaatttgggagtgtaaagcaagggtatcaagaattcaaagatagcttgggttgcaaaaggataccaatgccaccaagtaatatatctagctaaataaaacaactgagttgtatcactgctgctgtagagaataaggtaatttctttcagtctactctgtcgtttcataaaggacgtgtgtgctcccagtctgtttttctaaacattaatatgaaatgacattttctagaagtgtgtgaattattcaatttggcaaaagaaaaaactgtgaattaaatgtaaaaccaaaagatttacgttggttacagagactaaagtttgtgatctacaagacattagtaagaaataaccgagatataattatgattttaaaagaataaattaaaatatagttaaacagttataagagtctaatttagattaaaaatcatcattgttatgacaaggattgtcaatatatgatgcacaattattcatgataatgacaataatagaatagtaacacactttctataatgtatatatgcactaatgagttgatggatgtgattctgattaatactacctggctgtactagaccaaagaaaaacatagtaagaaagaaaggtgcttttgctcatctggaaaatcatacacaatctggaccttatggaattattaacatttttttagtattaagtctattattatagctaatgtttaacttatttgtttatcagtgataactatttgctttggagataaacatttccatttttgttttttgttttttgacttttttataatttactttcttcttatcatcaaacttaagaagtggatacacgcttttcatctcaaaagaggaatgataatttagctagtccaataatacccaggaagcataatgattttattgagtttcctatgagaagtgtgaaattaaagtttgttttgcttttaagtaataatttatagtgttaaacggtttttatatattttggttttctctttacagtgacagtgactctgtgtctgtgtgagttgacactaaccttcacctcatgtttattgactgtatttgtgtacttttcatactggtaaaatagaatatagaaatattggaaattacagatatacttcggagaataaatttacagaacatatttcattaactatacttgaaaagaaaatgtttttatgtagatattagcatcaaaattcctttcatgaaaacattctaatgaaaataaccctgattttttttagcccattttctattttaaatcacactaggaaggaatggttaaatccaatataaagcatagaacaatttaacaggcttaatagtcctatagataagatagaaatgtttctgctattatcttgagagttggtggtgagttaagtttttttctttaagcactacgctactcaatatgtttctttaataaaaattaaatgatgtactttttagacagttcatagaatcattgctttgagaaagcatttctgaaaatccttcatcatactaattccattgatgttttggctgtagtcatcattcccttcagagtgactaattacccaggtctcagagagtctatattttagctatcaaaatactaggttctcctaaggaacaggaatatatttcttggccttcaaactgatactgaagagtggactctgtaaagaggtattttcatgtgatgtgtggtggtgaacacttgtgaatacaacagtcagaagtagagtcaagaggatttctgtgagtttgaaatcatctcattgactcagtgagcttcaagccagccagagtgacagggaatctaatcctcaaagacagagaaaggatggggagggctcagtagctttggtctcatctcctcaacaattatgctgtttgtctttttatttaagcctttaaaaaatataacatagccttgatgatttcatcttccctttcctaactaatgtgaagacatgtaaatgaacatttcaccttttttgaatctaagatctatggaaactttatcttataacattattttgccaactagtgccattagaatattttctgagttttgtgaactccacactcacttttgaatgaaaataaaagtaaaatcacagagtatgatgtacttttcattttgatacataattaacaacacaaatcaataactttaaatttttactttctctttcacctttacttttcccccttccattggtgtctcctttatctataatccataatcaatgttggatcgaaaatacaaggaaagccagagtgcaatatttcttttggttatgacttataatcttcagctctaaattaataattttttgcctttattttcctttcaattcttccaccctttctatgcatcactgttccaggcttcctgtcagcccttatgttcccattcttctttttaaagaaagaaaaatattgtgaataaagtcaaataaactttaaaaataaagactaaggtattttcttgaagatgattctaagctaatttatagttagaaacaatttcaatttaaaaccaataaaaaataaatattttgatttagttgactcctatgattaagacagctactagtttccattggggaggataattattatcatccaggtgcttacatctcacagtttcacacacctatggagacttggtggtatttaatatctagcatgtttgtcccatttcttcttgttaaattttatgttacaataaattttatatttaatatcatagtaaactttctataacctcttgaaaaatgcggttaataagtgcttttactgtcatccccctttttttcctgtttcctcttaaaccaagaggaatgctgtggaattgagtaaaagtaagttaaattatgtataggaaatatttttttaaaactacaaaactctagaggcatctgtattcagattactttataagtagcttttacttttatccctgtttatgaaaatactgagcatccacactttggagtggtcttccttaatcttgggtttcatatggtctgtgggtggtatccaagctctttttgttgttgttgttgttgttagtatccatttattattgagtacatactaagccaagaagttctggctcacatgagcctggtatatctgtcccctgaaaggctctcctagagcctgaccaatacagatgcagttgcatgcagctaaccattggactgagcatgaagatcccaatggaggagttaggagaagaaggactgaagaaactgaagctgattgcaatcctataggaagaacaacagtatcaacctaccagacaccccccccccacacacacacacaaagctcccagggactaaagcaccaaccaaagagtacacatgggggcacccatgtctctagctgtatatgtagcagaagattgccatatttagcatcaattggagagaagccccttggtcctgtggaggctcgatggcccagtgtagaatactagggcaatgaggcgcaagtgagtgggcaagtcagggagcaccctcctagggtaggggagataggggctttgtggagaagaaactgggaaggaggataaaaattgaaacgtaaataaataaaataaccaataaaaaaagaatacagaaaattgaggacattgtatgggatttataaaaacagtagagtccttagcagtggagtatcactcaaaatgagtgttggttctgcaatcaaacattagcatgtctacttgtgtaagtcagaaagttagggcacatttgcatccctttcaagtctagtgatttgtttaattagttcagaaaactatcagttgaagaattataaagaggcttttactgtacctgttgagctaaggaaacaggctggaggacccttccctttttaaatggaggcttgttggattctttgagtgttttcatctctgacatcattaggagagcaaactgcacctaaagagatgtgcctggccttttggatctgctgtagcttttacatgttactatgtgcagagaataatttaccatcccttgagtaaatttctcttgcaatccagctccaactactatgagagtctccttgaagacatgtgcttagacactttatcctgaagaggaacaccctggtctgattgctgcattcaccatggaatgggaacagcatagtacacaacgataataaaactgtgggattattttgtttgtgttgttttagcattggcagtgttataaaaaagattgtgctaatacccttccatgtttgatagttagcatttagatgaggaaggtagagggcttcatgcatggcctttggattccataggaacatagctttattacatactataaaagggaagaacttcatataaataaaaagcacagaatttactcactggcatttctccaaaaatagaataactgtgttcaactttcattaaaaagttcttaattttaaaataatcattgattagaaattcaaaatatactaaatatacatataaattatgaggcaaagagactattccagtggttagcctaacttggtatatttgattaatatcacacattttcttcacagtatgtcacatgttttgagtttgtcttaacatacattatttctgtggggaaatatgttcacccgtaacagtagtcacatgagtaggaaattgatttccaagatcatttactctaatctttaacacatatagaaataaaaaattttgaactaaaaaaaaaaaagtagatatagcgttttcttagaaaataaaatcaataaatttatttatcagaagtaaaatattgatattgaatactaacttctaaatactttctgaactcagaatgtttcttcacaatgacacataaaaatatgctctcatacatgttaaggtggatcagaatgtataaacccatgcattggggatagctatacttggttaatgcctaggatgtaattagataaaaatgaaaaatgaattattttttgttgttttttgtttgtttgtttgtttgtttgtttgtttatcgagacagccctggctgtcctggacctcactctgtagaccaggttagcttcaaactcagaaattcgcctgcctctgcctcccaagtgctgggattaaatgtgtgtaccactactgcccggatacaaatgaattctttttttaaaatattttttattattacgtattttcctcaattacatttagaatgctatcccaaaagtcccccataccctcccccacacttccctacccacccattcccatttttttggccctggcgttcccctgtactggggcatatacagtttgcgtgtccaatgggcctctctttccaatgatggccgactaggccatcttttgatacatatgcagctagagtcaagagctccgggctactggttagttcataatgttgttccacctatagggttgcagatccctttagctccttgggtactttctctagctcctccattgggggccttgtgctccatccaatagctggctgtgagcatctacttatgtgtttgctaggccccggcatagtctcacaagagacagctatatcagggtcctttcagcaaaatcttgctagtgtatgcaatagtgtcatcgtttgtaggctaattatgggatgaattcttaataatcactgagttgaagcatacttaccatgttgctgccccaacccctccagaaatttgcaatcgtgaagagacatggagggtaaattgataatttggaaagattatgtggttcatattaagattctgcctgtacattgctagatcacatcataaatctcagtctcacaaattataaatctactccaaaataaacaaagtcagttttattgtacgttcaaaggaaacctgccactgttaagtgttcagtgtgttaagagacagattacagttttaacttacctaattttaagaataatatgaatttgacttttaaaaacattgtggtacgtgtttgaagctcttcatgtgggttaccattcacaacaatttcaggttaaatcctgacggagactcctgtttgtgtttaactgctctctaagtgaggtcatttattgtgtactggaaatcaatttagaagatcatgttagtatactaagcacttcagataaggcagttccatgaagcactccaagattatcacaaggaattgctctcatatgccataaaagagtaatgagcagaacatggcctgctgaaaggagttacagtttgacagcccctcccacagaagcattgaaatcatgcagtgacagttagctctggttagtactcacaacgtgaaagcataacagctagcatactctgggtgtgtggagccatttgtatgtgtgtctctcaatcgatgatgagggtttcagagccgatactggacatggacatgggaaactacagtgaagttttggacccaacttactcgaccttggagtttgacactatgcagattctgtataatcccaatggtgagttctcatatgattatacgtaagagaaataagcacaagagaaagaaatggagctctcagataggatggattagctttgttgttggagaattaaagagttgtgtctaagaccacaaatcagaatatgaatttaaattttgtgttacctaagctgcttaatgttagagatagttataatcttggctttctataggctagagagttacaaagcatagtttcagaggctgtttaatttgttgtacatcaaagtgatattaattttgacagattggccttgaaaatagattttctatacagtatgtaatgtggcttatggacaacattacaatggatgctggagaggtttactggctctactcttcatctcatcatctcagtactccattgctgtggataagaaactccacctaagaggactgtgtcgtctcttcactggacacagacataaatagaaataaaggtttatattataacctcaggttgaacagctaatgtttagcttccagagcttggggcatgtgtgtactgtaatattttaattttaaagaagacagattacttcaggtttgattctttaagtaatacagtttactatctactcataaaatagacttctttttctgaatagaaagattacacaagacaggttgtaactgttaatacttacaattatgtatactatgagtaaaatgcatacctctgtgcatgtgtcagtgtgaatgcatctttgtatagttcagactgaaaaatgatcttatgattaacttaatattcttctgacctgtgaattttatatattcaataagcaatggcttaatagtggggaaacttgtagaaactcaaaacccaattctctaatttaacataaatgaagtatgaaactacagtgtaatttctaggatggcacagttttgataaaggatacccaatatctatttcaatagaatcagagttttaataagaggccacagattcataaagagcaggtacagatgtactatattagtataatgaatgtttcattgtatcctaaaacaattcacactcatactacttgcacagtagtgtctaattgtttgcttgtaactacattgtcagctgtatgtaaatatggcatcaaaaataaagccaaacttaaatttgtttgtaatattttaatgttatccaacaaaccacaattgattccagatacttctttaaagtatttattatttaaaatcatttcaaaattcaaatatatttgacaacattcttctctactatgtccttcaacttcctcttctgtttcctatatatcctactttaaattccttctcaaataaaaacaaaaacaaaatctcaatataacaataataatcctcaaaatagaacaatacccagaaagaaaagcaaataaccctttatcaaactgtaaccagataaaagcacacaagaatgtggagtttattatatgaaatcagctattcctgaatatgaggccttcccagaagtgtttggtatattttttcttcattggagaacactgactttctctctcccagcaggtatatgatagtccacttgtacattttatgttagaggttaggttttccttcattcactcatatttttaaatatatcaaacaaaacataagaagataaaactattaaatggatgttggacaagacaaaccaacagaaaaaaagaacaccaagagaaggcaaaactatcagagacccactccttctcctacttaggaatcccatagaaataggaaactgaaaagccattatacacacacacacacacacacacacaacctgctacagacccatgtaggacttgtgcattctggttaagcccctgtaagttcacatgagccgtgagttgattttgaggaacttgtctcctaatgtccttcattctctctggttcttatatttttttctatcttctcttccaaggggatccctgaactctgatggagtcatcccacttaggagtgattgttttaagatctctcattctctatgtaatatgtggctgtgatttcagagagttctaatttccattcgacattactaataccttgttaatattataattcaattagtaaatgccaactttgtattttaccaatctttattagagataaagtaataggttatttttatacttataatatgtacttagtttatgctcaattaatattttgtggttgaatctataatcttgagcctactaagcaagttctatttcattgagtgatatccctaggcaaccaccaagttcaagttttaatatattaccttatgcatttaaagtctttgagtatgactggattcatagaatacttacagcaatgtaaactcattaaagaaatatttatatagtaatgattatatatgtatgtgtgtgtgtgtgtgtatatatatatatatatatatatatatatatattcatgggactacatataggcttatggggccacacacacacacacatatgtatatgtatgtgtatgtattaattgcttttgaacatgtgttagatgttcccctatagctcagtagagttctaagaagtgataaacagaagtatgagaaaaacattaattaattctctgacattatgatactgatattttccatgtaaaaatgcatttatgagccaatccatttgtagtaaaattataggcaataataatggacctttaaatgcatttaaaaataatggtagtttgttcaactctaggctttgcttgaaggacagatgggagatgattgactttgaattctaaagcagattcatacaaaacatgaaaagtgttctggaacctcagagttagcttaaatactagtgtggaaatgtttaggaaactttgaaaagtatagttgatgaaatcagatttcaaagaacacagaaaggtagcagacatgtagaacagtaaacatgctggaagccataatgggcagtgggctgagagtggtgggatgtgccagagcagggcaattcagtgtgacgagggtcattatgggtagtggtgaaataactggctttatgctttcaaccccccatgtattggatggacaaagatcacgtgaagcagctgtctgttagaatataaacaaaatgagagtatgaaaattagatagaatgttttccagtaattcttagaaagggtgaccatgttaggtaaaaccattcgcctttgcactacatatcttatgaggttattcaattaaatgtaaatggtaatgaaataactcatggaagacacttaaaactttatctctggtgtggaaccactggcttatatgcagagggccaaatgaagcagaatatcaactggggaaaaattattttcaactattatgcttactagacatcacaaatgaaattcttaaatagttctttacgtctttaaaattgtactctatggtgttatcatggaagaaataaaatcccaagttttttttttttgttgttgttgttcattgagttgatatctgtcatgaaactgcatgagcttctcttaagaaaggttgtgtaatttagattaatcataacccaaaattaaattatcaaataggagacagaggctgaggagggtttctcagcacttgaaatgaaagcagcaataaagaagtctctgtaaagcaaagaatgatgaaggagcaaacagttgacaatgggatgtagtaacttttctcatctttcttcaacagacagttctgccccagagaccacaagtatgaataccacagacagtggtgtcaactgtttatgtgccatctgtggtgacagagcaacaggaaagcactatggggcatccagttgtgatggctgcaaaggctttttcaggcgcagcattcggaagagtcatgtttattcctgcaggtagtagggtgctcatttcagcaaaattttctttcttactgtctaaagatacaaccaaggttaattaagagctttcataactctgtaagtcagaaccaaattgacaagcttcaaaatgaactcatggttgtatgtgcagtttgcattcacattggtagttccatcctataaacaatctgagacttgtaaatgtgcataaagaaattctcatacctaccacccagtttagagcaatataattgaatactccagtggacacctccctggccacttgccctcagtggccaagggagaactaccctctagactttggtgttaatcttttctttgtgtttctttattgttttatcacatgttcatatgccactaaatactgttttaaatctattaaaatggcttaaagtgtgcagtttttgtgtaatttctctttaaggtccatacatcctgggtctttagcaacaaaaatttaaaactacagggtgactttgtatcttatgggttttaaatggtaaaatttaattttcatttcaaagtaattctcaggttaaattttacacaaccaacagggttgtgtctaaatcttatttaactaattcaacaagtccatacatttctactagtctttttgatagtacttagtcaatatcatagctcagtttaaatttaggtatttattctgattgatttctatgatagtcttttagtatatactgtttaggttgaacttgggctgttgacacgaatcactgaattttagcagaaagaacaaaaaatccatttttgtaaggatacgttggacatttgagaattcccaatctggtaacatttgactgttcaagttataataaaagttaatatgtaacttcaaaaatttctaccttgtgttcttttgtaatatttgaaggggagtttgatgtcaatttaaaaatgtaaatcatctactttaaaattttgacaaagtaaagagcatttagatggtattgtgtatgttcacatgcccattccatagctaaaaatgatttgcctctcctaccaagcacgttttctccatggttacctcacacacttgagtgttcttcacattaacacctgaaggaacaaagcaacatggaggtgccattgtttggagtcatgtgcactattaaaagtaagacacagctccatgaaaagtgacagccctgatcatggaatattatgacttgtaccttcactttattgggggaataaggaagaatcaccatcagagcaagtttttgaggtgtcctagtaccccagaggcagaggcaaaggcaagtggggatttgtagcttcacactatgtgtgctgcccactaattaggctactatacagttttgatatccagcaatctttgtggtcttttttttcttcttcttctggaaaatagttgttgtatggatgcagtttgagaggtcatgtctttaaagtcaagataaacggtctcaaatgtaactattgcttagactgataaattataatttgactttaacagtcttatgctgctgaagctggctttcccctcctaaagtacttaaatcttttaatttagtaatatttatgggatgctttctataactactgtcaatgtttctgtgtatttggtagatttcaaattattttatcatccattctgtacttacataaagatactgaacatgttaagaacttcatggtgtatgtttcttctttctttttaattcaattaatgtgaattaaatatattctccttgtgatttttggtcacatgttctcttctgagtatttatagccccatattcaaaagaatgatttgcattttctattttgagagtacaactcacatgttaagtcttgtctgtaaacattactaggtcataaatcacattgtattatcctcatcgttcaataatcaccagcaacaaatgcaacaatagcaacatgtgtagctaggaattcacataatagcatattaagaattgtgtgactattgctatcatcaattaaaagtagcccccaattactgtgtaatgaaatctctagtagggtgtcctgcagttttcctggctctactgcagtgtaaggaaactattaatctgcaatctgttactatagattttcctctctggacactgtactacatgatctttggtatcaccttcatttgtaatggttttcaaggtccatcagcatgtgtgtctgtgcttaattctgacatgttaacaaatagcattgttccaatgtatggggatttatctgctcatcactccaagagttttcatttcttgtggatatatacacaccttggaattgctgtgtcctatctgcaattctgttcttaacttttagaaaaactgctaagcatttttgcaaagtatcagcatttaatattccaaccaacagagtataagagctcctgtttgttgtctattacatctttatcagcatatgtatgctatccagtctgggtttttttaagagtataagatggtatgtcattaagaattaacattcttattggttttctcaatcgtatataacttgatattcatagtaaatcttaatttaacatggagtcatttaaatttaatagaataaaatcgtttaaaaagagaaaccacacaaaagtctaaaagtatgaatcatgagccattgcccatcatgctgaaatcatgtagcaataaacactaaatctttatatgatgaggatattaaagctaggcttgacatctatgactcacaatagcacacactggcccaaaatgatgcagtcattcagattttatttttttggtaagactatctgagaagtgagttgtatattttcatgcatgttccaatcctgagctgttcgatttcttaagaaattattttatacatactttgtattgagcctgatttaactgtaaatacttaaaatctaattgtttccttatgtgcttctttttttttgataaatgattgtcttgtgtgaactaatacctgtttcttgttacaggttcagtcggcagtgtgttgttgacaaggacaaaaggaatcaatgcagatactgtcgattaagaaagtgttttagagcaggaatgaaaaaagaaggtaatagtaataataatgatggtggtaatttctattattgatgcaaagggataacaatgtgcaaatattctcattaatcacaacaacctacttaataagttctgatttccctcaatatattaatggaaatcctatcaaagagttcctagttaaagaatttagcctaaggatgtacagttagtaagcagaggaactagtacttatctgctctgaaagttgacactatcctttccataggaaaaatctacacacagattagagacaaggatgtactgtatatacacttttcatttttaggagcacctgggtatctttacttatctcacgaacatcaagtcaaaatcttcttcttatgtattcctgtaattggtttcctaaacattgctgtttgctaaacactgttccagataccgagatctgaattgcgaccatgatggagaagataattctccatcctgagaagctcatattctattcagttataggtgcaatgcagatatgttattccatgtacagtagttttacttttgcctgttaagtcataccattttatcttttctcagtctgacacgattaaagaccactatgctatacaccccaaacatctggcaggtttagcagctgtaagacttactttctgtattttcttgagtctatgtcttcatatgcaaagagctacatcaaagaggtaatttctcctttcaaaatgaattagctaatgtcttaaaccctctattaggtagatcataggaataattacataatttatcaaatgctctttttttacttattacctgaaaacacatccttacctttataaaattgtaaacaaaaacaaatttgtatttcccctttgagtctgacaatttatgaactacctttgaaaatactgaacttacatctactctttataaaatgattgtttaattttactaaataggttggaaagtaattgctgagcttaaaatgtgatgattctagctcttcaataaataatatagcttaatataaagataaattaaatggacaaaaaaccagggatttatgtaaaatttgcaaatgcttaggtattataaacatatgcagtgttttaataaagtttgataatagaaatcaaatttataaacacagaagaaaatcttttcacttctatttacttaaaaccgtcttagctagaaaaattttactttctagtttagtagtgttttgtatttaaaagaaaacaggactttcagaatctatggcccacatctcctaacagtggctatgtttttatctttgacatggccaacctgaccgacagtattctttgtattttaccttactgttttattaactgagagaatagaaaaccatattaaaaacacagcatgtcaaaactgggtgacccaaccattcccagcatttgtctcatcacaaagtccaagccaccatattttctgagctctggaaacaagcttagctattcctatctttgaatggatttcaaagtggttcaagaggaagataataagaaaaaaaaaaaacaatttttatttctacattttgaaagactctatctgaacatctgtaatcttccttatttccatctctatactgtagcctacgttagagatctaacaaacaactatggttttctctcttagcggtgcaaaatgaacgcgacagaatcagtacaagaagaagtacctacgagggcagcaacatcccctccataaacactctggcacaagcggaagtgaggtcttgccaggtacatcccacaccccagcattggctcagaaatcaaatccagtgtctgctactgcaacatgctgtcattgtgctcactgctaaagtcaatagagacaggctcaaaaggaacattttgaaagaagtaggagaatggttgacattttttgaattttaacaccctacctttaaatggaaaaatgaagttaattcaaagtgcaagattatttatgaagtcaagtaaaaatataacatagcatgttgttctgtttcattgcaatattttattggttagatctataaaatcatctgctccaatactgagggaaatttcatcagcatttctttcttttaaatttattttaaggaaataaaattaactgaactcaagaagtcaacttgatatccccttagagaacagatgctttggtgagcattagaggcagaactcatgaaatagtgaaaaaagtaaatttcattacttacaaattttaaagtaagactatcaggtgtgaagctaaaaggatcaatcatgcattttacacatctattctgaagacagttcattttagcattgattttaatggaaatgttcagggtgtttgtccaaggtaaggcaaattatgaaatacccaagcatttaatcaagtcctctcaggaggcagtgagtctactttcattcttgataacacacgagtaatgtgatgaggttaacatcccattatcatccctattactaggatattacttgatggtccaataaaacatttagagtatggcttaaaggggagctgcaagagaatatcgaggttcacatgacaaaggcacacatgcaatacaagaacctatggctaaatttgactttacaaaactttaattaggtagaaaacattgtaaagtatcattttcattttcataatcaagaattatgaacatttttagaataatcatcactgtgttacacatttcaccattgctgagtttgtttcttaattttggttggtttattaattttatttttatggccttctaatattttttgtttcttctctaaatattttccacctttgatcaacttatccacttacttttttccacaaaaatcaaccaattaaagatggaaaaccttaatgaaaatatgagttttaactaaaaatacaattatagagtttatttcttgtggttactatctatttctttatgtagtcagtttgaactacaaacttcctccaaaaacttaatctcatttacagatttggtatttaaaataaaattcttcactctgagtgtgtatttatatactcatgttttcaatttagctttaaaccaaaaagattttatttctcaaattaaaaatgttgaaaatttatgaaattactatgataatgataattctttctttcatgctatttatgttacatattcataggaaatagaggaaatattggctattcagtggttttaattatgaattcatataatattagatttcagtcccaagccccagttccagcactgacataaatattaagaaaatcgcaagcatcagtgacgtttgtgagtccatgaaacaacagctcttagtcttggtggaatgggccaaatacatccctgccttctgtgaactgcccttggatgaccaggtatgatgtagaagaaattatgtcttccttgaagagtggctttaagatttgctaaattctcatgctctttgatttatatctgtaatgcatttaatatattagacagtagttgaattattatgggaactaatcacaaggatttaccttatcattttacctttttattctgtaaagagacagaagtgctttttgtctattgttgattgtcaggatctaacaattattgaatggttaagagtctgcagttttggagtttagccatttaaatgaggaagaaaggtaaacagcaaataacaactttcacggaaattttctggttattaaaggagtaagtatttggcaaactaaaagaagcaaaaggtgacctgtggtgtcttgagtttcctgaatgtacagaataagattattcagaaatgcctggcaactcctggacagaaactaaggagaatatgttggtttctttgtggatcctctatataattaacatgtaaggttttttttttcttaatgctaccaattttattctggtatttattatactgaaatatagaggtagcaaaaatatatgtagattccatatctgaaatctaccaagaaaaaccaagtaagatacagtcttcttttcctaatatgtacagtttttaactgggtaattgatattgagaatttttaaataataacttgaaacagattttttcattagaatttgaaaattcatttgtatttgactccctttgagctgttcttcctaaagcgtatatacacgattttatagatgagaatactattaaaatttccacttctttcacattgaaagaattaaccacactaagaattcaacactatatgtagtgctgtcattggcacaagaaaatcatgccaaataaaacaaaaaacaagtatggttgtgtataaattaaggaagggggaaatattcacacactagaagggaacataatcattataatcattataggaatatagcagttatatttctaagaaggtactttattgtggacaggaaaaagttccatgaaaactgaaatcacccttacagtattttttaactcccttcctggagtgagtcacatttattgacatgtcataaagatagcttggctcagaagattatgccacagtgaataaattgctaaaaccttccagtctcaccccaagcaatataagtagggctgtgttatttatcagctttatatttttattatcattcacctttaaaacctgctgacatatatatacatatataataacaatgctcaaaatattgggaaattggtgcttggcaactatgtaaaacgtctttgtttacttcttattcacattaacagtataatattaatagttatggttagtgaatgctggttacaggtaaaggcgctgaggaataatctctcaaatgtatgcttaattatgttattctatttaattcttttttattggatcttatctttattgacatttcaagtgttatcccctttcctggtttctcccccaccccagaaaccccctaccatatcctccttcttggtgctcccttcaacccacccactcctcccatcctgcccaggcattctccaacactggggcatcaagccttcacaggaccaagggcctctcctcccattgatgtctgacaaggccatcctctgctacatatgtggctggagccataggtccctccatgaactctttggttggtggtttaatctctgggagcttcagggactctggttggttgatattgttcttcctatggggttgcaaaccccttcatctccttcagtcctttctctagcttctccattggggacaccttgctcagttcaatggttggctgtgagcacctctgcatttaattcttttaggagctctgtggtataggtgttatctctgttttacagttcctgaaagtggactccacagaagtttattccatccataaattcatgggatgactatttactagcagactactggtttcagttagatactgaggggatcctgcagtaaaagtgcagattgcttcactggaaactttgtagtctatttgggagagatgaacagtaaaaagaatatatacaaattatgagtaagttgactaggtagaggtaggctcaatgaaatttcataaaatggaacaggatacattggagggtgaatgagggtgagatggaaagacttgattatgggaatcagagaagacatcatccaaagcaagaatggtcaaagttgaaggagaattcttgagtatatgaacactgtgctcagaggttgtcaggcaggtggtgaacagtgagtgctgtaagataaagcagggacagagcaggcagaaggtaaaaaaaataatgtctactcacctaatgtcacatgtaagatcacagtagaggaatctggactttattttaaggacaatttgaaagcattgaagtttttagcagagatgtggtatgtacatatgagtggtttaataaaagatgctccaggactgtagaagtgattgagaagcaagcatagcaagtgggtgtgctagagtagttcagtgacagggtggaagtcacagagaagaaaggcaatgggtggaaatggtttacactttaataaccatcaacagatccttgagaagttaaagaatactccacatagacttctgttggatccaaacaatcatatttggatgctggtagcatgtactattgagcagaaaacataggagaagcattcatttgggaagtgctacacttgtcttggtttctctggttgtaaccagtacagaacggagggaaagaatgaatatttactgctgcaaggtcagacacaatctagacacaagtaggagctgatcactttttctttcccccctagaagtgtagggtttgctttgtttgcttaatttattttttgcaggaaattttgtttatgcaaattttgtaatctcattcccaggactacatctggtgtttcacttttcatatgaaagcagatgaaatccaaacctactagtatatatgcaaggttaaataggggatcgagggagcaggcatcgcactaaagtgtaacctcaaactgctccattctgctttcctcagaaaccaaagatctgctttttttggctatccccaaaagcaaatacttctgatgtgctacagtagaaacttggacagcctaaccattttacgtgtgcataattattttatttcagaacaaaacaaaacttaaagggagtcaggcttaagaaacgttgtaagttaatcagacttaccttgtactgtcttttaattgttacgttttataatgacttgttaaaatttgcaaacttttcttaaggtggccctcttgagagcccatgctggagaacatctgctgcttggagctacaaagagatccatgatgtataaagatattttgcttttgggtaagatttttttaaaagacgatcttgcacatgttttatatttttaatatgcaggattcattcagcacctacaaagcatccagctcttaggaaatagtgctatgttattcatattcctcccttagctctagtgtgctatgtgcactctgtatgtgtgtggtgtggtatagtgtgtgtgtgtgtgtgtgtgtgtgtgtgtgtgtgtgtgtgttgtctgtggaagtaagagaacagattgcaggagtcagttctctctttcaactatgtgtgtcctagaaatgggatttgggtacccctgcttgggtgcaagcatctttacccactgaagcagtttcactgcccgtatttcttttgttttgattttatgtaagtccagaatgatgtgagatgatatgggaaaaaaacactgaaattttaaaatgaagtacagactttgtttcataatcttaatggtgacttctgtttaagtcttatcaagacaaagaatttatatgagcaagtggtattagtgtagctaatatttgttgaaggctctgctctaagtgcattgtggtaacatatactctctcatttaatcactaaaataaaacctcatctcccagtaattctactgtgaagagatagaagacaggaatgttttgatcctggtgcaaagccaggcagcctagacctgaaattctccaccataatgggatcacagaatgtgtccttgatttcagctaagcacttccactgcatttctacctaacactgcagatactgttctatttagaaatattttcccaatatatactgaaaaacaatgcatcttattcctcattcttggctgttttttctttagtaactaggtcaactatttcacatgacagtgtcacatgaagtaaattacatgaaataatagatatgttaccttccgtggctatgataatcattcctttttccatttatgtgtttatacaagcatcacatttgtactctttacacatatacaatattttagtccttcgaatatctggaaagctgataagcaaagcagaaaggttaaaagaaccttgcagattcttatgctagctttcccgacctttggcaaaatacctgaaataatcaactttaaaatgtgaggggttttgtggcttccagtttcagtgatgtcagctctcaggtacttgcattgttgctttgggcctgtgaaagagcagagcaccatgcttggtgtatttggagtatttgggagagaacactactcatttcaagaagaaagaagaagagacacagaataaggctagtctctacacattcccctcaagaacatacattccgggctacagagatgactcggtggttaagagtattgactcttttcagaaattcagagtttgattctcagtagctcataatcatctgtaattccagtcctacgagatctggcacccctttctagtttctgtgggtaccagtcatacatatcctgcacaaaaagacatgcatcccaaacacccatgtatataaaaataattaaattaaaaaagaccacactttcaatgatttgagccccttcctctgggccccagttttaaaaggcttcaccatctcctactgatggttgttttttgcagttcacaaattcagtacataggcctttagggaatagtaaaaattcaaacagtaatgaccacctacagtggagtaattaaaaacataattgttcatataacatcaggaaatagtaatttagattttagaaattatggtaaacctttaccatattatagctagagaatgtctaaggtagaaaattctggcagaattgggtggtcctgctcaatcaagtttcagaactctcttaaattcagttcaataaattgttcaagccaactctatttaaggtaatcaattgtcttagttaggatttcgatttctgtgataatacactgaccaagagcaatttaaggagtaaaggtacagttttcttacatttccatattactgttcatcgctgaaggaagtcagtgcaggagcacagcatggcagaaatctgtaaagagaagccagtgcaaaaagccatggtggaggcctgctcatggcttgtttcccatggcttgctcagcctgttttcttatagaaccaatgaccaacatcccaggggtagcacaaaccacaatgggctaggtctgcccagaccaatcactaagaaaatacctggcaggtgtgtctacagccagatcgtatagaggtattttctccagtgaggtttcttcttctcaggggactcgagcttgagtttagttgatataaaatccaggtggcccaccaaggaaaacaggctgggaagataaataagtaggtaaagttcttatgacacagttgtcagaaattaaatccaaatctcctagacccatgtaaagtcagatgctatagagttcacctataggcccagtacttccatcaggagataggtggcaggcagagaagggagactccttggatgttcaggggccaactagcctggcatccagcacaaaacagcaaagatatcctctgttaaacaaggcagcatgggaggttgtcctctggattctatgcatatgctgggtttattacaggcccagactcatggatccctcctccctccttatcctcccacacaaataaaacaaaagaatgatctatgaggcaactccgtgacaatacgcatgataatttttctccctacttaaccttatttaaagtgcatctgataggctcttaatccaaaagcaccaaagcatgctggttttaatccactgttagtaaagaggattctttaggatttgtgttaatcttgttaataagtgaggcactaatagagttctgacagaagaaagctaattactgtcggtcaatcctcccctgtcaataattagatggttatgagtctgttcttgtttttgttgtcaccagtgactgaggctgttaaaatgcacgtgggcacattattgttattgattccctgtgtattctggcatagcttccctaactcagtgctatggaaagcctttgtacctgacacagagccccttccagaagagaccattttgaacactgctacatagaaaggcaaacacacaagcagtccctcagaagaggctaatccttccttttcattcaggaaaccactatgttattcaccgcaacagctgtgaagttgaagtcagtcgtgtagccaacagagttctcgatgagctggttagacccttccaagagatccagatagatgacaacgagtacgcgtgcttgaaggccattgtgttttttgacccaggtttgttttcaaaattcagttggtatcatgaaacttaaaccaccccctttcatcttagagcctttactctcatactctagtctgatggtgtcctatgtgtcccaatgtttcttccctcatcagatgcaaagggattgagtgaccctgtgaagattaagaacatgcggttccaggtgcagatcagcttggaggactacatcaatgaccggcagtatgactctcgtggcaggtttggagagctgctgttgctgctgccaacactgcagagcattacctggcagatgattgaacaaattcagttcgtcaaactgttcggcatggtcaaaattgacaacctccttcaggaaatgctgctgggtggtgagtgtacctggatttttattattattattattttgtttatgtatttgtttgtttacttatttatttattttatttgcctagctttaaggtaaacattaggacaagttgcccccttggctcagaattgcttcaactttgaagctcccattcttccctccttttgaacttctaacaggacacacaaaatctaatttgttccattttgaaagtctacttaacctaagggagacaaaaggtcctggacatattcaaatgccaattcctactagtcttgggccttttgtttatgtatagcccctttgacttcaacactcagacccttccatagatgctaaatagaatgtattccctgcttgtagagcaatgagaagtatagtgggttttgtttgtttgtttttgttgcttttggcttttatctcaaccttctttaaaactctgagaagagaaaaattgctgcattgcccatatgtgaatcaaatggctttaaaatgaacattttgttcctaaaaaaattatctgacataaagtagtagaaggagagggagaagaatagagagaaacacttccatgttgcaataaatgtcaggaattagttaagaaatcattattttatgttctgatttagagtaaatttccttgtaaaatcactatatttatttttagttttctggtccttaatgtgttcctaatgatatctttctgaattataagttgctcctgttattagggtgattccaaatactataaactagaactaagtgattcttggacctgccttaaaaacagtcagaaaattctgctgttctaggaaacactacacaggtctattattaatactcaacatagagatataagcattcatttctccaatgaaccatgaaaacttatgctgtctttaacatgaaagtagttctccccatttgttttcttaatttcccaaaagtacttttcaaatagccatatttaaactgtcactggaaatgtatatgaaggtaagtctacagtttttgtaactgacactaatgcagtcatctctgtgtcttttgtaggtgctgccaatgatggtagtcatctccatcatccaatgcacccacatttatctcaagatccactaactgggcaaactatacttttaggtcccatgtccacactggttcatacagaccagattggtaagaatctgggaaaatttcctactctaactaacatctcttacatttaattattttgggaaaattgtaatttaggaaaaaaacaaaaaacaaccccccccccaggaactgcaaacattagatagaatttcctctagttagctgtgcaaaactgaaatactttgttacttactctctctacatatgaatttgtatcctaaactgaatatgtaaaatcttaaatttttcttttctgtaactctgggaggcataaagctactgctttgatgctggtctagggctgtacaaatagccataaaagatgaaaccaaaccaataaattataataaactacaggataattacattttctactgacctttatacttggtaaaattttaagaactctttactatactatatctatatattgaaagtttgcagagaaaataaaaaaataaacgtgcagttctgatttagggagttttaagtgatcagaaacagtgagaactaacaaaatacagcagagcaatttcaggaggtggtgggacttggaggaatggagccaatcagtgaagtctcacaaataggcagctttatccagagcctcctacaatttatcctctgtgggtcaagaaaggttatttgagtaaagttctcatgagttcaagctgtataccatcacaatgacaagccacacatggcaaatcatgtttttccatagtggcatataagggaaggtttacatatttaacagaaagcaataataagtaattgggagtaaattgactgctatcttctacccctgggtggaccacaaaaaggcattccaagaacaattccaacttctaaagaaaagttttcttaaagtattctcacaaacactcagaattttcctcacaggacaccattcctggattgtgttccaacagagagggaacatttttcctgtatgatggtctgttttacgccttcaaaagaatgaatcaattatccatgttttatattttctatgttcaatattttgaagtagctgtgaagattcatttattattatttttccattactgagttcacttccattttttggaaatcaacaatatttcccccctcacttgcatggacactcatttcttcctaagtttctagatgcaggcttacagccttgaacagaaacaccatctgctgagctacttctgctatggtcccatgtcaacttgaatttcaatttccagcattatagctgctgctgctgctgcttcttcttcttcttcttcttcttcttcttcttcttcttcttcttcttcttcttcttcttcttcttcttcttcttcttcttctgcctttcatctttgttggtcaattctttcaattcactttttgtaaatgtttacctgacttcatcacttggggatcaaggaagaagaaaactatactgtgtcaactgcctgaactaaagaaaagataacagtgatccagtacagacagaaaaacttactgagatcagtggttcaacacaaagacatcagttattaggtagtagtttctagatgaaaggttgagattaaagtttgtttatgcaggtatttacagagaattgtaattatcatggtaactagaattataatcatatggttgtattattgtagtgcattttaactaagccatggcaactagaattcctgcatatcataattgtgccaaatgaggctacttatgaaagttctttagaattcaaacaatcaatgtattatagttgtttgtgactatggtaacaacacattagtgcagatttaatgaaggttctacttttctaagctactctggggatagaaattctatttgacaaggaatctagaattaactggttaattgcatgttattcaatcttcatcgctgtggtggtactggagagaaactcttcaggagcaaagagttgttttggtgaataatttcagcttcttagttcttcctaagccccagggcatatgctaagacaacataatgggcagggctttgtacagtagaacctttaatttcacagcaaccaagaaaaaaaaaagagcaaaaagcagtaataggtcaggaataaagtaccttccagagatattccctagagatctatttccacacctgaagtttctaccatgccccaaatatcaccagcttaagatgaagctttttacatgtggtctgtgggaaatgcttcatatagaaatcataaaatgttttttatgaatttgtgcctattaatgccacatttacttttgatctgttgcctttgaatactaaaacagctacctaactgcattgattttaaattattgtgatatagttttatgcatatttgcattatctattgactatatagtagactttaataactattcataatgtttgtgcagcaagatgctccatgtaattgcataatttgggagttccactaggctttcagcctatgtatggctaagaaagctgaagtcatttggcccttaagagatgagtattgatgaacattcgattgagggtcagagataaataattgttaacaagaatctataaattttagaaataatatggaatatttattatactttccattagcaaatagtaattgaacaaaataatggatttatgacatatatatgtacatatatatatatatatatatatacacatatgtgtatatatatatataaagattttttttaataataacccatctgttgctcattcttaccctcttgtaatgctgtttcatttataaattttagagtacagaaaaaagaaaagcccagcatcaggccagaaaagttgcagaattctgtcctagaaactagttatttataaatgcagagattgcaatacattagcagcacattagtcattgaaggcatcaaaggtagagtttgataacttgactggtcatagattccttcacctttaaaacactagagttcaacatttaagatttcaggatccttattgctattctttttctctgctcagaagaacgtttatgagatttacttgtaaagaaaaatttagatttgtttgtgcttgctcaaaattgtttctattatatgcaaagcaagatgttaaaaacatcaactaaaaaatttagggtttacttggtctttagggaagatacctaaatttttaaatcatctgttgtaatagtcaaggaataattagagtagtaaatttgcatatttctattcaaccaaggtacattaaaaatgccactttttgaagtaattgttaatccatatttagcagtaatataaagtattaacaggtaccagccaaatggagattgttcttgtttttattgaaattctttaaaaattgaaaagtctatacagttcataatgtaagcaaataatttatgctattttttgtaaaattaaataacttcttgttgattattttacagtatggtaaaatttcaccaaaggaatactttcctacacaataaagtattcaaacttcactgaagaaattgttcaattcaattttttatattcaattactttctattaaattatgcaggtttgctcttaacattgaagaggaaagaccagggctactcaattgtaatagaattgttaagcaacagaccagcatgctacagacattacagactgcagcttagctttgaaaactctcataaagtttacttttcatatcatctagtattatgaactagtagaaagcaagccaattatgttttaattttaaacatatcttgactgcagaagttatgaagattgtttccaaatatttgagcaaaataaccatgctatgaattctcttcactaccttatttctcctgcgtgttatggagatcatagtattcacaaatgctattatgaatggcaagaaacatcttgaagagagaatagagtgtttatcatgcccattgatcatttgatcattgtttagctgtatttgggaagagggtgagaatgctctgccattagcatgccaaaggcttggtaactcaatatacaagtcaataatttacctaagaactttattcaaaatatagtaatgtagggctttgtgtgatgatgcagagtgactgctactatcatattcaattctctgcttctttttcagcaactccagagaccccactcccttccccaccacaaggctctggacaagaaccgtacaaaattactgcaaatcaagcttcagtcatttcacatcaatccctctctaagcaaaagcagctgtgagatggggcttccttctgaatagcactgcataaatgtgaaacacatttgtcttcaaatatctcaagatgatacttttgtctacttcaggcaaggcttcttcatggtgctgttataagattctatcctgttttcttgtttgtaaacacattttgtttattgttgctgtgaagtaaagctttcatatgctttattttcctatgtatatttgggtttgaagtgtattgtttccaactgttcctgcactgtgcctgaaccacttatatatgacttccatgttttcataatattaacttaaatctgtaaatatttgctttgttatgatctgatacagaactaagtattctttttgttagataagaaatgctagttaatataaaaatcaaccaagtttttttgtttctttttgtttgtttttgtttttgtttttttttaataaaaaacaaattgtaaacttgaagattacaaaaggataagcagtggctgtagaatagaatatttctgtgatggagaatacatcagggactgctgaggccagcagtaaatgtgcctatgttaaattcagagaaacagcaccattgtaaagatgacaggatattttttgcaatatgactgcacttcaagagatctgctaaagaaaagtatgctgcttcttttagttagcatagaagacaaaggaaaacaaagaaatatgaaactgtatttcaaccaaaaatgacattcattttttactgttgagaaatctggaaaatcacccattcattggaacttagtgtgtccccatacccagttccttgggaagacaaaggagtctttctagagtaacctgtgttagttcaagatatgcaaat

SEQ ID NO: 497 - DNA, 2332 bp, Mus Musculus
caaaatttttgctagagatccaggaaaataaacaaaacaacaaaatcccagtgccaccttggagccccacccaatttccaggctgcctgaaaacttcttggctctccggaaggtgcactgctgaacaccgctgtcactgtcagggcgcatgcatatggggatctgctactgagatgcagagcaagccttgcagctgactgcgacgcgggagctccattgccgctggcatggacagttctgccccagagaccacaagtatgaataccacagacagtggtgtcaactgtttatgtgccatctgtggtgacagagcaacaggaaagcactatggggcatccagttgtgatggctgcaaaggctttttcaggcgcagcattcggaagagtcatgtttattcctgcaggttcagtcggcagtgtgttgttgacaaggacaaaaggaatcaatgcagatactgtcgattaagaaagtgttttagagcaggaatgaaaaaagaagcggtgcaaaatgaacgcgacagaatcagtacaagaagaagtacctacgagggcagcaacatcccctccataaacactctggcacaagcggaagtgaggtcttgccagatttcagtcccaagccccagttccagcactgacataaatattaagaaaatcgcaagcatcagtgacgtttgtgagtccatgaaacaacagctcttagtcttggtggaatgggccaaatacatccctgccttctgtgaactgcccttggatgaccaggtggccctcttgagagcccatgctggagaacatctgctgcttggagctacaaagagatccatgatgtataaagatattttgcttttgggaaaccactatgttattcaccgcaacagctgtgaagttgaagtcagtcgtgtagccaacagagttctcgatgagctggttagacccttccaagagatccagatagatgacaacgagtacgcgtgcttgaaggccattgtgttttttgacccagatgcaaagggattgagtgaccctgtgaagattaagaacatgcggttccaggtgcagatcagcttggaggactacatcaatgaccggcagtatgactctcgtggcaggtttggagagctgctgttgctgctgccaacactgcagagcattacctggcagatgattgaacaaattcagttcgtcaaactgttcggcatggtcaaaattgacaacctccttcaggaaatgctgctgggtggtgctgccaatgatggtagtcatctccatcatccaatgcacccacatttatctcaagatccactaactgggcaaactatacttttaggtcccatgtccacactggttcatacagaccagattgcaactccagagaccccactcccttccccaccacaaggctctggacaagaaccgtacaaaattactgcaaatcaagcttcagtcatttcacatcaatccctctctaagcaaaagcagctgtgagatggggcttccttctgaatagcactgcataaatgtgaaacacatttgtcttcaaatatctcaagatgatacttttgtctacttcaggcaaggcttcttcatggtgctgttataagattctatcctgttttcttgtttgtaaacacattttgtttattgttgctgtgaagtaaagctttcatatgctttattttcctatgtatatttgggtttgaagtgtattgtttccaactgttcctgcactgtgcctgaaccacttatatatgacttccatgttttcataatattaacttaaatctgtaaatatttgctttgttatgatctgatacagaactaagtattctttttgttagataagaaatgctagttaatataaaaatcaaccaagtttttttgtttctttttgtttgtttttgtttttgtttttttttaataaaaaacaaattgtaaacttgaagattacaaaaggataagcagtggctgtagaatagaatatttctgtgatggagaatacatcagggactgctgaggccagcagtaaatgtgcctatgttaaattcagagaaacagcaccattgtaaagatgacaggatattttttgcaatatgactgcacttcaagagatctgctaaagaaaagtatgctgcttcttttagttagcatagaagacaaaggaaaacaaagaaatatgaaactgtatttcaaccaaaaatgacattcattttttactgttgagaaatctggaaaatcacccattcattggaacttagtgtgtccccatacccagttccttgggaagacaaaggagtctttctagagtaacctgtgttagttcaagatatgcaaat

SEQ ID NO: 498 - protein, 418 aa, Mus Musculus
MDSSAPETTSMNTTDSGVNCLCAICGDRATGKHYGASSCDGCKGFFRRSIRKSHVYSCRFSRQCVVDKDKRNQCRYCRLRKCFRAGMKKEAVQNERDRISTRRSTYEGSNIPSINTLAQAEVRSCQISVPSPSSSTDINIKKIASISDVCESMKQQLLVLVEWAKYIPAFCELPLDDQVALLRAHAGEHLLLGATKRSMMYKDILLLGNHYVIHRNSCEVEVSRVANRVLDELVRPFQEIQIDDNEYACLKAIVFFDPDAKGLSDPVKIKNMRFQVQISLEDYINDRQYDSRGRFGELLLLLPTLQSITWQMIEQIQFVKLFGMVKIDNLLQEMLLGGAANDGSHLHHPMHPHLSQDPLTGQTILLGPMSTLVHTDQIATPETPLPSPPQGSGQEPYKITANQASVISHQSLSKQKQL

SEQ ID NO: 499 - DNA, 156296 bp, Homo Sapiens
gaggagcctcggttcccctcgggcggctgaaggaggggctgagcctcaggacccctaggccaggccgtgttgaaagcagataccccgaggcctcgcccagcctgcgctggagggaagaaggcgctggaggtgcggcagcgggcagtggggggaccggggaattgaaaggtgccagtcctctaccttagaaaagaaagaaagagagaaggagagagagagagagagaggagagagagagagagagttgtatttgtttgggtgcagagaaagctttggtggctgtagcgggtcatgtgattcccaggtctctggggggtcttccgtgtaagtacttctgtggcctggggcaaggccaggacaaatggatgttcgtggaccctggaggtctgtgggtaggtgcttggtcctgcagcatcaccccatgcatggcctttgctcaagtctcagcttccatccatctctcatggacacatcttgggagtgggcatctgccggtgatgccgttgggggatattttaaatatagtattgagatcttcctagttaactttgggatgaaatgtcctttggaagcttagttaacaacgtgccagttaagcaataaccgttctgtgtctaactgaaataagccagcacgtgataagatcttagaatggaatgaatatatgtgcttcatacctgatgatctgtgcttataaatcttgctcggaactgagtcaaagcactgtacaacaagcaaaacaatcagcatgagttttcacttgcgggcaagggcaagagaatacagaatccagaagctcaaaagtgaatgggatgtcccggaaactaaacactcattgagagcaccatttcctggttttgtttttgttagtttcttctgctttctcgttaattttacaggtttcccttctctctttagaagcggttatttgtcattaaacattcttcctgtctagctgtcaccgtttttccttaggagtcctcctgtccccacctcctcaccaccactccctctcttttcatgtcctgtggatactctcactcaagccacctgatctgctgtgtggtcgaagtaggtgaccaagtagtgttgggctctttcctggtatcacttgaaggtgtggcaaggagagggaggtggtggtgagtggtggtaaactgctcatttttcacttttcaaaatggagtggaaaattgagagccgtttgtcttcccatttctcctaagctccagttatgggcccacaaataaggacatttttccaaagtgctttatgaaggttcaactcttttagtaaagtgtgtttattaagatctcacaaatattgcatttttaatcacggttataggcatatgggatagcgcaaatttattttagggattgctaagattaaaaaaaaatactcctcatgcaaataataagtatttgtttttgagtgccttgttctttttttttttttttttttttttccgagatgaagtcttgctctgtcacccaggctagagtatagtggcacaatctcggctcactgcaacctctacctccccagttcaagcaattctccttcctcagcctccagagtagctgggattacaggcgcccaccaccacacccggctgatttttgtatttttattaaagatggggtttcaccatgttggtcaggctggtcttgaactcctgacctcgtgatctgcccgtcttgacatcccaaagtgctgggattgtaggagtgagccaccccacccggcctgtttttatttgttttaaattcttgttttttctataaattctgaaggtaatattttctcataaaacaacatcaaaatcgtagtaaaatagaaaaagagccccctccccattccactccatgtagtgtaacttctgttgatgtttgggtttgtgtttctctaatctctatgtgtataacacagacagttttattgttttaaaatttgaatggttcatatcatactagtattctgaaatttatttttctttaatatttttcaaatacttatctgtcaatatatacagatttttttttaaatgtgtctacccaatgtaaccagccagtgtccctcagaatattcgcttggatttttcaatttctaagtattacaaacaatgatatgaatatctatgtacattatctttgcatgggtactgctgaatatttattctgagaagagaattgttggcaccagggagatgtttgatagatattgccaagagcctttctaaacacccacagtatatttcttgtaccatgcttgccaacactatataataatgatttatttagaatgttgtcaatctactgttgaaaaattgattcctcattgttgggaattatataaaccagtcccagaacatctgacttggggagttcgggaatttttctttaaaaatataataaaatgggaatggaattaaatacacttgaatataccatcttattctgagcttgtaaaagaatctaccgcatttgttactaactatccatttactgaatggctggagatactgatacatgataatgagcatttctagattgcaaacatgtggaccatgtttgcaataacaacatgttgcagttgtgattttgtggtttgtaactacatgttttccttccaaagagaagattcacacccctagggcaaaagtatgattttaaatgaggtgttatagctctgggtcctttaaaaagttatccatgcaaatgaaactgggtatgttgttgaaacaaacacagtcttgcaattacttctctccaccatcctcaaaggtatttatacctattggtgtcagtcctgacactcatatagagacataaggaactctgcaaatatggcttactcttattcttatgttttaaagaatacgcacgcacacacacatatagatcaggtaattcttattgaatacttaatatgcactaggtactattgtaggcaatttatatgccttttgctttttagattcttataacaatcctgtgctgttcatattaacattcttcctactttacagacggaaaaagtgaaccagagagaaattaaataacttgactaaggttacacgtttacatgggatagagctggggattcaaatgaaggcacgtcagctctaggtcgtgaacgtaactatggctgctccatgtcctcattgagttgcttgctgcacaaaggtgcctaactgagcagaggaacggttgaaacctttacactacccacaaaccaaaccatgtccctttgttcttggctgaatattccctggggaaggcacttttctaggccacagaatatctgtaagaggtatcagcacccttgctgctgttggataatttgtaggagctacacagacctattggtttccatatgtatctttgtaactcaatactatttacctactcattatgggtagaacttaaataacagatttgccttattgcctgttcttccctaccttatattttaaaacatgttgacagagtatgctctttacatgatagaattagctgataacatctgatgttcccctgaaaaccttttattttatcaagatggtttcctggaaaacgaatagggagttcactttttttctttttgtgtgacactcaacattttgaagaacatgaaggtctttaaggatgactagcttcatgggaagctgcgtggtgtataagtcacaagggcaggcctcgttgtcagatggcaaggtttacatcccagcccagttattcactaaatgggaagggaggggtgcttgggcaacctatcctctttgaggtccaatttcctcatttttgaaatgtttgcaattataatacctatgccatataattggtagggtaattacatatgctaatccatgggaaacatttagaacagtgcctggcacattgagtaccaggtatgtgttctgtgttgctgttcttatggtagagtgagataatgcatctacagcactgcttgacttgttgtaagttcttaataggtgttacttgtttttattgatcttctctctagagattattatatttatatacacaaagtacttataacttcagaaaattgtggaccgctggaaacctgtccaagccctctaataggccttggagatgtattgatgaataagaaagagagtctctaatttcttggagctttcagctaagcagtgtagagaaaaatcacaccaagtatagttccatggctggaacattggctttggagttattcctacctgtgtgcagatctcaattctgccgcctgtcagttgtatatcccagagcaagtcatttaatgtttcttcagattaaatagctatgaaatgagaaaatagttcttactttcaaagtacatatggataaattcttgcattatttaaattaagcattttgtctgttgaatgtttgacacttcctacactctatttcagtatagaagaatcatatttataaaggataacaaaaaaattgacaagaaatctaggcagcttttcccccatctcatttaaaagtatcattatttaatagtaggatatcatttaaaagtatgataacacctggatctgacaatttaatgttttaagtattttgaatctttgttcccgtgggcttatgcactgtcttgtgctttgcttatgctcttggctgactgaagattatggactgtgttttagaatttttttttttgcattttcttattgcagacatcatagttacaggttccaaataaagttaatatatattattttagcaggaattaagttatagggtctctacacggtacctggaatacaaatataagtatcactgcaaacagtgataatctaccttgaagacaaacataaggtgacactattatattaggataacagataattataattagtataataccgtggaaaacagaagcaaaaagggtacatttagcttgagtagcctggagatatttcagggaagtgttaatgacttctgatgagaacttgctgagtagagaagaattagaaaagtatttggggcagaggagatcagacttgcagtaggaatagtagcaagagatgaagtggggaaggaacactgggccagattctaacaatattgaatgtgggtaacaaggattggacaatgtctgcaaggcaccgggaagccatcacaatctttaagcaggttgagttaagattttttttcttaagattgactggcagcattttggaaaatgggttaaagacagaaagaaagggagaggagaggaggacaggagagggcaagggagggaaggggaggggaagggaggggaggggaggggtggggaggggaatagtgagaactacgatagtggccagtggcaatgaaggtgagaagacattagaatctgtaggtttcaaaggtatttaaactgaattgatcaattatagaatatgtaagatgaaggagtgagagagattgaaactgacctacatttttatatttctcagcaatgacttagaaacaactctttcctaaagttctcctgtctggctggggatacctataaaaaaaaattattggctgggtatggtggctcatgcctgtaatcctagcactttgggaggctgaggcgggtggatcacttgaggtcaggaatttgaaaccagcttggtcaacatgatgaaaccccacaaaaaaatgagcatgggcatggtggcgggcgcctgtaagctcagctacttgggaggctgaggcaggagaattgcttgaacctaggaggctgagattgcagtgagccgagattctagcattacactccagcctggacgacaaagagagactttgtctaaaagatttaaaaaaaaataaaaaaattattattcaccatgctaagtataattgttgagtcctggggaagtattattaaaacctagtgaaaagccaactcacttttcctggagtaggttaagaaattaaatataaattctttatttttaagtcaggtttattgagatataatttgcaatcagtaaaacccctttttatgcatgtgcttcagtgagttttgacaaatgtatgtagttttgtaaccattaccacaatgaagataaagaacatttctgcacccatccccctcaaactccctgtgcctttttgtaatttttccctccactacaccccaggcaaccaccgatctgatttccgtcattaatgttgccttttccaggataatatataaatggaatcatatactatgtacccttttatgtctttttttttaatttagcataattattttgagattcattcatcttactttgtgcatcaggagtttattcctttgggggagaaaaaaaaaccttggatttatgaggtgttattgacataccataaacagcgtatatttaaagtgtacaatttgagaagttttgatatatgtatatacccatgaaatcaccacagtaaagatagtgaatatagccaacacctccaaaggttttctaaagctcttttatacactctttctcctgttccttgcattcccttccttccctgtcccaaagcaaccattgatctactttctggacctgtaaattcatttgcattttctagaattttatatccatggggtcacgcagtattattttgtgtctggcatatttcactcagtgtaattattttgatatgcatttatttggttgcatgtatcaatagttgtttttaaaaatattttttgctaaatagcataatgttgtatagatattctgcaatttgtttatccattcacttgatgaacatttggcttgtttccaggttttggctatcacaaataacgctgctatgaactttcttgtatcaagtcttggtgtgtacacttacatttgtcttatatgattacctaggaatagaatggttggatcataggcaaagaattaccaatctggtttccagagtagttgtcccattttacattcccaccagtagggcttgagagtttcagtttctttacagcctaaccaacacttggtatgatcagtcttctaattttagacattctaaaagatataagatatttcattgtgattttaatttgtatttccctaatgactaatgattctgaacatcttttcatgagcttatgtaacataaatgattatctttggtgaagttttgttcaaatcctatgcagtccccttcttttaaaaactgagttgtttgttttttttcattatcaagttagaagagttctatatatattatagatatcagtccttttcaagatatgggttttgaaaatatttctccccacatgaatttattcttatacaagggataggatttgatcaagagaaaaagggtaaagatattatattcataaatgggaatagcatgtacaaaaaaagaaataaaaaattggatttatgaggcctcaatatggagtaaaatagaaaaaggtgatagaaaatgagttttcaaaaataaagagtagcctgaatataaagacttatggaatttagactctttttgtgagcaccaatactaataaatatcaatacaacaacaatagttatactaagaattgagcattgcagtttatagagtgtttttatatacacggtctacagtgtttccccctggatcaatttgctttagtcctgtgacaactatgtgaaggcgcagagactcggggccatgtgaagtcaatatcaaatataggtttttggggtttaagccaatgccttttcaaccagtgtgtgcacgtgtgtgtgttggggggtggggggcatgtatatgtacatttaatggagtgtgaggaaagaatgacagctggattggtctacaaaggctcagaagggcactttcccaatagggcaggggagagtgtcctgctgagctctggcaggtggtacaataggttctgataaagtttgggttgtatacccgtactttaaaaatgacaattcacagttattatagaatggttcacaaaaatttcaaaatctcagaagatattttagattctgtgaattttttttagttgtcttttatttgtaacctgaccctagataaataaagtaaaattatatgttagttaatttgttaagacaaaaataatgtgatcaagttcttttctttatttttaattttgttgttttatttttaatgtctcatgggaattcaaagaacttactttttcaaacacagtccttttgttcagtatattctgatttcattgtcttgctcagggctctgccctgacttttttctgcatacggctgacatgcaattagaacatcagatcaacttcggaaacatgaataaaaattacctgctgaatagactcatgatttggacattttcttttttttcttcagtttttgaacttacttggaagctttgaaatgtcctgatttgctgtgttttcaaaattttcacccatttttaactcctataggttctttttatggtaaagtaccagtggcttataaccgagagaaactgaagtctacttgccagtgtgtggcttctccatattaaaatgctgtacccttaaaaggaaggtaaaaatgattttaatagtaattatgtttaatatgctcatacacattactgtatgttatttgtgcctcttttgtgtgatcagttcaaaatcactttaagaaaactgctgaagtattgtacagcatgtctatgtagacttcgcatgggacctgccattttctcacagataaacctagaaggcttgagcttcttttaaaataaatttgcataatcattctgtttatgttcatattacttaattagtttggggtgatgaaaaacacatgcaggttttggagttaaatacacgtgattcaagcctgcagctttgagcatgttagcaaacttcctgaagctctccctacccagtttactgtacattgtgagacataaataagatgacatttaaagtgctcagcatagagtctggcaaaaggtggatgtacttaataaatgtgtaattgcttgctatcttgactcttctttatattaatatttctatatatttattccgattactgtaggtttggtacacacacatacgagcatgtgcatggtcgcacgcgtgtgcgcacacacacacacacacacacacacgctgctgtgactagtcagcattctgttatttttattttttatagatgagggtcacccaggctgaagtgcagtggtatgattatagctcactgtagcctcaaactcctggcgacaagtcatccttctgcctcagccttctgaatagctgggattacagggagttaacatttattcagtttatgtgtgctagatactaaatgcttcacatatattaaattgtttaattctttcaataactctatacggtataagatattgttatctccactatgctactaaggaaactgagtcaaggagatgttatgaatacccagtgagactaaataattagtgtaagcattaaataggaaccaaggccattcgtctccagagcccagtttcttctgataataacttaaatactaataaggtcttatgctattaatctcatctcagtttttacagtatcttctaaagctaaaaatgaaataaggtaattttatttttctcctttgtgttctatcaattatttatatgaagcatatgaatgatttcactgaattcaatttgagcatctattaggtgaaaataatttaactgatatttcatgtgtaaataaacaatacggcagattgacttctgagacgtgttagaatagattttgtaaaaccctgaacatgaaattttaattgaaactaatttatgaaatcaggaataaaaatgataatagtcacatatttgatcaaatagaagctggtgcttatggtattaatttttatctagttttgcacgataaattttgaatacttagttaattataaatgtgtgtgtgtctacacacacacacacacacacacacacatatattttaggtaggagtgttagtttgctagggccgccataacataatgggccacgtactgggtggcttaaataacagaaatttatcttttcacagttctggaggctagaaatttaagattaaggtttcagcaggcttggtgtcttctgaagcccttctccttggcttgcagatggctgcttcctcctggtgtcctcatgtggccgcccctagattggtgtgctgtctgtgtcctgatctccttttataaggacaccagtcatattgtatgagggcccaccaacttgacttcatcttaccttagttatttctttctgaggtactactgggggttaagactttaacatatgattttgggagggacacacagttcagccaataataacagggcaaccataaaatggttttgtctcattagaagcttggatgttttaaatcttccttacagtctatgcatatatttgttttcgactatcaattaaatcaactcggttcaaacatctagaatcaaaaccatttatgtttacttgtagaaagctttcctctctcctaacagtcatatcctcatccacactttcctcatatttggccttagtatattccccctttgacaagtccttctggctaggacaaatggcaaaattgatgtggcttgaggatgatatccggagtcactgaatatatagaaagaagaatctttcatgaataacctagtgataagtctctctctctctcttttttttttttttttttttttgagatggagtttctctcttgttgcccaggctggagtgcaatggcacgatctcagctcaccgcaacctccgcctcccgggttcaagcgattttcctgcctcagcctcccgagtagctgggactacaggcatgagccagcatgcttggctaattttgtatttttggtagaggcgggttttctccatgttggccacaccgacctcgaattcctgacctcaggtgatccgcctgcctcggcctcctgaagtgctgggattacaggcgtgagccactgcacctgcctgtgataagtctcttgttttttaaaaaataatttttgcctgctacttatgtacaaaccactattttcccatcatggcctttgagtcaatgatagtgttttgattaaatagcagcagagggaagttctgtggacatgcatgtttgtgtccctgagactatcagaagttaaacaacaatgccaaagtaagctgaactccaaagcaaggcagatactgtgtttgcatttgggagaaaccgttttaagtatttctttgaggcttttgtactctgctcggttcaggtcctcatacaggcatttatgtatcaccttaatttataaatggtgagttttagtaggaagcattgaatttacacaaacaataatccagaggctactaaactgggtacttctcttgaatcaatggaaagaaaaacacagcaaagcacccttcatgctgagcaaaagtttcaagatgtcagacccattccgagggacactatctatggtggcttcccctctgtcctgtttgaaagagataaatacacataagcctttaagatacaaagggcagtttctgtatttgaagttatgcattacactggtgatttcagagtttctcaggtaaaatcctaacaactgtgattgcagtacaagctccatgattcacgcccaccaacacttcaatgtcactgacaatgtaattgcagctcatggatgtttaggagagtgtgctcactccagtgcgtctgttttaaaacagcgagtgattagttgtgttatggctttagccatcttgcaataaatgtattaggaacagtggtttattgatttagataaatgtatcaggtcctagctatttaacttctttgtgctttagtttgcacatctctaatatgggatactaccacttaactttcataggattcctgagaatcttcagttgaacaacatatataagacaacactcagcaccatttctggcacttggtagttgcttaaccaactgaaatatttttttgctattatttttaatttcctcttatgatatcagaactaggttaaaaaaaaaactcccaattttttgcttaaatcaaaagccaggagtcttcttaatttctgtcttctccttacacatcttatctaattcatcagtaaattagagatctgccaatattaacttcaattgggcctcacattttctacttatctttatctctactgctgctatgttgtctgagccaattgtgtacgtggacaactgctgtaagtctacgaactgctttctccgtaaccacattgctcccttcaaggaggacattcttaaaacttaaataagaatatgttatcttcctgcttaaaatcatctgattggtttctcattgtactaggaataaagtccagactctttcttgcggcctatgaggtgtttgacgttccggcctcagccgtctctcttttacctcttgcaactctctttgacccctgaagttttagtcacatctgagttttcttcattctcctctaattagtcaagctgttttttatcccagggccttccttcatcatttgtgttcaatattccttccaaacccttccccgatctcccacacataaacatcatatgaatatattttatcctttagttctcagtttctgtgagtttcctctgatttgtacaggtgtcttttttcatatttattgatgattggagataactgagtagacccagctgactgggaggtctcagcagcagacggttgagtggatattgtcacagaaggccaggcagcaagaggagaaaggaaattaggatgccgagtatttaatgaagcaaaacaaacaaaataactctgactcattctttacatataacttgaaaatgtaaattacatgacgtaattatttttgtttagattaagatatgatgattactaagaagtgctagttgaggactctaaagcagtactggacaatgaaagtataattcagcctcatgtgtacttttagttctcttatagccacatcgcaggtaagtagaaacaaaggaaagtcactttaataatctattttatttaacccaatatattaaaaatataatcatttcaatgtatagccaatataaatgtacaaattattaatgagaaaaaacaaagcaagcaaaattattaatgagatctttcctgttcctttttcatggtaggtcttggaaatctgtgcattttacacttgcagcacatctcactttctcgcagtcacagttcagagctctgtgaccacatgtggccagtggctacctagttggtcagtccaggtctaagggttatttaaaggaagtttaatctgcaccattcctttatcatctgggatgactttttattcaattttgtgacaatttaactttgaattggttttttagattagatataccagctttctattttcaatgacttttaaatagatgtatgggaaaaatattttctggcatttacgaaaaacctatcatctctatcttaattatgtttgaagataaatagggttgacaggggttagtttacactggagagttgacagtgctgctagagtttctgcaacttttaagatttatgtaagaggcagtttacacggaaattgcacatgcaagtggttcacaaacttgagtgggcatcagaatcagctgggaagctagtaactctgaagattttttggcttcaccccgggactcagtaggtctaggatggtgccgagcacctgcatttgtagcaagtttgcaggtgctgctcctgctagtagaggccactgctggcatagaccatctcgtctctccacatgcacggtgcacgtggagattgccttgagcaacagggcatgtttttcttctttatatggttgatgatgcagaccctggaaactactcttttttcatttgtttgtttctatgtgtgtgtgcgcgtcaggtggagggtagatggagaaagttacttacctgttcattatgctgttgtgttctactttgagaaaacagtagcaaaagaactttaggggaaagataacaacaaaataaatttcagagaaggaaactgagatcagtgggcaatacaagctccctagtgactattccatatatcttactacttatgctgtgaggggcggggaaataggaaggtattttacctttacagtgtctattttctaggtccagatgacagactattagtgaaataataatagctctgttgaatactcaaccaaaagctagtattttccccacagtaatttatctgttttctagccattatgatatccactaagttctaagtgttaaattagcttttaggctcacatggaaataagtaccattgtttatatgatcagggcagtgcttgttcagctactgtttcatgttggatttctgcaaagctgcaattgtgtgaatcaggcctcagtgaatactaggtaaaattaatgtcaaatttctaagtgatgaggaaaatcattatcaaagtaaatatattaactttgtaaggctatagattttaagtttttttaaataaaggctaaatttaggaaataatccagtgaaattaatctttcctcctcatgttctctgaaaacttatttctctgctgcattatctttttttttttttgagacggagtctcactctgtcacccaggctggagtgcggtggtgcgatctcggctcactgcaagctccgcctcccaggttcacgccattctcctgactcagcctcctgagtagctgggagtacaggcgcccgccaccatgccccgctaattttttctatttttcactagagacggggtttcaccgtgttagccagtatgtattatctaatatttattgagcatttattatttacaggcactgctctaaatgctttatcagcattaattcatttagtcctcataacaagctgataactatattattatcattccgattttacagatgggtgttacacaaccagttaggagcagagatgatattctgctgggcttaattgcaatattatatcttcctctgtgagattcagctgtcttaatttgttctttcaacacttggtctttcttccttgacctcctattccataaacttgtaccaaactatacatccatttgaaatatttttggcctggaattttgttcccttttccataattttatacttttttctccctccatgccttctctaagtcattcaccttatctgaaagtataatccctcttcttttggcttagctctgcccttaataacattttacattagttagctctcataactctcagtatatttatgacttttctttatcttttttttttttttttttttttgagatggagtctcactctgttgcccaggctggagtgcagtggcacgatctggggcgatcttggtgcactgcaacctcaacttcccgggttcaagcaattcttctgcctcataactccgcctcccaggttcatgccattctcctgcctcagcctcccgactagctgggactacaggcacccgccactacgcctggctaattttttttgtatttttagtagagacggggtttcaccttgttagccaggatggtcttgatctcccgacctcgtggcctgcccaccttgggctcccaaagtgctgggattacaggcgtgagccaccgcacccagccatttatgactattcttaattataaaagcagaaacagaacatttaaagaattttttaacatgagaattaaatcactatccagcacacatatacttccttctttgaaactttctgccaagtttctttcttttttttttttttttttttttttttttgataaggagtctcgctctgtctccaggctggagtgcagtggggtgatcttggtgcactgcaacctcaacttcccgggttcaagcaattcttctgcctcagcctcccgagtagctgggactacaagtatgcatcaccacacccagctaatttttgtatttttagtagacacgggtttcaccacgttggccaggatggtcttgatctcttgacctcgtgatccgcctgcctcggcctcccaaagtgctgagattacaggcgtgagccaccgcacccggccctgtccagtttcttatgtgtgtgtgtttgttggcaggtgtatgttttatatttattcactatgagtaatttgtatatggatttttacattgattattgaattattttttccttattaaagtaatatttagcattatcttcttaatatcaaattaaatgttcgttaaatagaaataatacaatctatctaaccctttttaaaatttttgtacaggttgagagtgtttattaatacagcatcttaaattttttacctttattttttaaatttccatttttatttttgattcaggggccacatgtgcaggtttgttacaagggtatattggataatattaaatttgggcttctattgatcccatcactcagatagtggacgtaatacccaacaggaagtttttcagctcttgcccctttctctccctcccaccttttggagttcccagagtctactgttcctaactgtatgtccatgtctacccaagatttagtgcccacttataagtgagaacatgcaataactggttttctgtgtttgtgttaatttgcataggataatggcctccagttgcatccattctgctgcaaagaacatgatttctttcttctttaaatggctgcatagtattccatggtatatatatatgccatattttctttatcgaatccaccattgatggacaccaaggttgatgccatgtctttgctattgtgaatagagctgcgatgaacatacaaatgcatttgtctttttggtaaaatcatttattttcctttgagtacatacctagtaatgggatttctaggtcaagtgggagttctatttttagtgctttgagaaatctccaaactgccttccacagtgactgaactaatttacattcccaccaatagtgtataagcatttccttttctctgcagcttcaccaacatcaatgcagccatttatttatttatttatttatttatttatttattatttatttattttagacggagtctcgctcagccacctgggctggagtgcagtggtgcaatctcggctcactgcaactttgtctcctaggttcaagtgattctcccgtctcagcctcccgagtagctgggattacaggcacctgccatcatgcctggctaatttttgtacttcagtggagacggggtttcaccgtttgagcgaagctgatcttgagctcccgacctcaagtgatcctctcgccttggcttccctaagtgctaagattacaggtgtgagccaccgcgcccagcccaatgcagcttttaaaaaatcaacttatctagtattaacttccagaagttaatttagtgagtcaacaaattagcctttttctggcttttaacatatatccttgtattgcttttaaatgatttttttaagttaatggtagccaatcttaatcatacacacaaatttttacatatattatataatatatgttatatatataatatttatatatattatatattttttatatatatacacacttctgtaaccattgctatgccacataggaaatttccaactacccaaaagtatcactgggctcctaaccaggcaaagattaatttcgcctattttactgtcttgctgtgtatttttctgttgttctctggtatgccattggatgaatatgccacaaataatttaccaaatctactgtcgatggttaattgggtttcccgttttaggctattacaataaagctgtcttgaacatagtttacatgtcttttactggacttgacactcctttctgacgggtatatttccaagagtggaattactggaccataggggatacatgtgtttagctaatattagttttttaaggtataaaatctatttaaaatataaatggaaatatttctattttgtcaattggtaagaatattacactatcatttaaaaggagatagatcaaataatttagaaaagtggtagcagagtctagaaacaactaattccacttgcctttggtcatttcctttctttccgtataagcttactgtacatgcaactatataactattttttcacaacaatatattcctaagtttttagacttttattgtcatactgttttggctgtaagcacccttcacttccattcctcgtggatttcgctcatgccattttgtctgtccagaatcacatcttccctgatctctgtgtttctccattgcacttcctctagacttatcgtactttttatttaactaagattatcagagcaatacattttaaagaacttaagctattcttataaattatctcttctggtcatcttatagcataattttctctaaattaagcagacacttcttttatatcttctcttatacctctgaaccaggaagtgaactcagaaaaaatttccttcaacacaggctttcatttgtttgttagggtgtgccggcaataaatattttctctctgggacacctaaattatagccactgttttaaccttaataatattgttgaggtgcagaccagacaatgtttccattattgcaatttttatttattggaggataaaaggttgtttagtgaaaagagaaggtgggaagaggtaatgattggcaattcttatttattggaggataaaaggttgtttagtgaaaagaatagatgcgaagaggtaatgattggctaagtactatggaactccctgacactgatcgaattatgttaatgtttagttcgtacttgggagtattacagtcgcttgttaaaactccattatgtaactccattttcaggcctgggatcatgatggggttagggataaatacaatgattaatttttaatgcaaggcaataatcagatttaaacattttaaatctgtgtattctttttggtattgttttttaagtggttttagttttgaaaaaagttttagttaatgttcaatgatattgctattacatgagaagtgaggtgataataagtaatctttttagaccagtcttatcaaaaatttacagcataccatgtactggttatttgcaggtattcttttactcatgatctctctgtatttctttgaatgcatgttaccttgtgagtatcagtgagtaggctgtgatgttgaacatctgacaggcatccagactctaattaactgttgaaataaaaatattaaaaaattaagaataggctaggcatggtggatcatacctgtaatctcagcactttggaaggctgaggcgggtggatcacttgaggtcaggagttcaagaccagcttggccaacatggtgaaacccagtctctactaaaaatacaaaaattagcctagtgtggtggcaccacctgtagtcccagctacttgggaggctgaggcaggagaattgcttgaacctgggaggtggaggttgcagtgagctgagattgcaccactgcacgccaacctgggtgacagagtgagaccctgtctcaaaaaaaaataaaataaataaaataaaataaagactatcttctcatctagtatagtactttacagatagcgaatgccttgttaagtatttgttgaatgaatgaatatatattagtataataggttaaattgtaataagcctatgtttctttgatttagataatagcagggtatattgagaaaaatgtggaaaataaacagaatttatatactagccctataaatgtatatatatgttatgtgtattatatcaaataactaatattttattaatgcaagtgaaccctgaaggtttgtgtagcattatttaagccagcagttcttttcctcagggtgcatccttcacaaagtctggcacatgaataagaggaagtatgtacagtagtatcaatcaaagcaacattgttttagtactagaaatcaatgaacaatcccaatgtccatcaatatgcataaaacattgctttatatacttataatggaacattacattgtggtgagaacatataaactagaggtatactcatcaacatgagtaataatattattacttacattttgtaaagggaaggtaggaatattgatcaaaacctcaggttaatgctgcatcatttaaatctagacctagcaggtgggtgtatgattggagagaggcacaaccggggctttcccagagtgtcagtgttctctttcttcacttaggtaagttacttggtgtttcacttattgttagccttttaccctcacaaatgcattatatgcatgctttcatctctgatatattttaaaattaaaaagaaaataaactatttcctaggggcagtaatatgttaggtaatatccttgtatttatggagcttccagctacagtaaaggtagacattaattcaataactgcaattactccaggcttatttaataagaagtatgtgatgccataagactatgcaatagctgatacaatctaatcaagaaagcgcagaaagagcttcactgagaaagttgtaactgagctgatatctaaatgatgagtgaaaattaacttagaaaacaaaggaaaaaaagaggaatatttgcaaaggccttctggtgcaggagagagcactgttgaacatgaagaaaataaagaaggccagtatagttggagaaaacagtatcatgaagaatattatttgagaggtagtaagggtcaaaataagaatcttgtagataatgcttttgcctttgcctatgttgatgagaagctactgagatattttaagcagggagatggggtaaacagattcacattttgaatatattattctggtggcaggtgaaaaatggattgggtggaggcaaaagtagatacgggaagaccagtcaagagagtattttagtagttcaggcaccagatcatgatagcttaacggaagttactggtagagaatatgagaagagtagattgatttcagagaaattttgagggcaaaatataagggacttcgtaataatttagaaatggcaagtgtgcgagaaattcctcaagaataatttctaagtttctagcttgcctaaatgaatggttggtggtacccatcacagagagagaatataggaagaagaccaaaggttaaatggacactccaacatggtcagatttgtacacctaacatgtgtgcatcttagatctctaggatcaggtactgactcaatttagactttgtctttcaaaagttatgtttcaacaatgtattttgtctggaatttaatcttcaatatagtgtaactccatttttctctctctttctctctttttttttctttagacaacatacagacatattaatataaagtaagtgtttgggctctgtttttctctcttccatttcaatttcttaccattgtccctacttctaccataggaatctctggatttctttccaccacaggaatctctgactctaaatcccacataatggaggattattggttctttgctactcaccatggttaattaatactcacttctcataatgaagctggtagtatctaatgtaagccttgttccaggattagtgaagatcatgacgtttcataaaagtgtagtgaagttaagcacagctctgtgttttgttccttttaaagcagaaaggccgatcaggtccaaaagtctgagttgaagaaagaaggctagaatcatagcatttcattgcagtgttccaatcagaaaccccatagttatcctttccttgtatttctgacagtatggtagactgaatgtctagagaaatcctttcattagcaaaaaacctaaagattccagacagtatatgtatatttaaaaattactttgggaggccgaggccagcggatcacgagatcaggagaacgagatcatcctggctaacacagtgaaacctcgtctctactaaaaatataaaaaattagccaggcatggtggcatgcgcctgtagtcccagctactagggaggctgaggcaggagtatcgtttgaacccgggaggcagagattgcagtgagccgagttcgcaccactacactccagcctggtcaacagaacgagatcttgtttcaaaaaaaaaaaaaaaattaattgcatagctgagttggtggaaagtaaggagaattctcagagtccatgaacagcatgaactaacaaatcaagagaagtaagcaagatgaatgtcactgaaacagacattttctctgaagatgtttggaagttcttcactgcatacagcctaggatttacaagaccattttttgtaaacaaatttagtttgggctggcaaaagttggcagatttgactacaaatacctctgcatgaataggatccctgaaagacaatacttattgtgaattaaataagcaaataaaagagacgggggtagggagtagagagagagagagagagagagagagagggagagagagagagagagagcaagagagaatgctcttgagggagatatttggttctgggtgtagtgaaggaaaaggaaagtttcaccagaagaaaattcataacttctcccttatgtaagccatattcatagtacatatgtaacctcaaaacctctaaaggtaaaattttacttttaagtgacacttggttgatagtgtccccaagtactttgcagaagcaagcaaaaatcctgtgacaagaaagcactttaaataaaggtcccacataactctcatagataaaatttcaaaggatatgagattgcattaaaaagataatcactaaatacaaacagaatagaacatctcagtgaaagaaatcagtaaaaacaaactggagaagtagattacgaagattgttgttagaaatttcatttgtagaatgtaaattaattacatataatgttcaaaataatatagattattaaaaatatggtaaaagacagaagactataaaaacaaacagatacatttaaaaaagaaccaaagagcattttgagatatgaagaaaaattaacaaatgaaagttgaaatttattgtatgtgttatacagcagagtagaaatagctgaaaaggaaatttttgaaatagaagatagatctgagaaaattatatagaaggtagagcaaggagacagagctggaaaatacaagagactttaggagatagagaggacagaaagagaaattgcaacatacatctaactggagagccagaatgaaggaagagaaaaaacatgagtgagatgtttaaagtgataatagttgagttacttttaggattgatgaaagacatggatcttcatattcacataacaaaacaaatcttaagttaattatggtataatcacagaacggcttgatatagtgaaatcgctgaacattgatcgagattttaaaaagcagaaaaagataatatagaaaatagaagacagtagtatatgatagaaatgaatctaaacatatcagtgatcgcaataaatataaattgagttaaattttcaattaaaggagattatcagacagaaaacaaaacactacaaacaaaatcccacttctgttgtttataggaacacacctaaactaaagaatatagatgctaaggcccggcacagtggctcacgcctgtaatcccagcactttgggaggctgaggggggtggatcacgaggtcaggagtttgagaccagcctggccaacgtggtgaaaccccatctctactaaaaatacaaaaattagctgggtgttgtgtcaggcgcctgtaatcccagctactcgggaggctgaggcaggataattgctttaacctgggaggcagagtttgcagtgagccaagatcgcaccattgcactccagcctgggcaacaagagtgaaactccatctcaaaaaaaaaaacaaaacaaaaacaaaatagatgctaagtgcagtggcttacacctgtaatcccagcactgcacttacaacagtggctgaagtaggagtatagctggaaccaaggagttgcagaccagcctgggccacatagggacaccccatctctacagaaataaaaagaaaaataattagccaggcgtcatgatgtgcctgtagtcccagctactcagaaggttaaggagaggggatagcttgagcccaggaggttgaggctataggttaaaccatgattgtaccaccgcactccaacctggattatggccctgtattaaaaaaaataaaaaagtaaaaagatgggaaaagatgtatcaaaataaaaaaaaaaagaatttgttttatttatttatttatttattttgagaaggaatctcactctgttgcccaggctggagtgcagtggtgcaatcttggctcactgcaacctccacctcctgggttcaagcgattcttgtgcctcagcctcccaagtagctgggattacgtctggctaatttttgtatttttagtagagatggggtttcagcatgttggccaggctggtctcaaactgctgatctcaggtgatctgcccgcctctgcctcccaaagtgctgggattacaggcataagccaccatgcccagccagaatttaccttttaaataacataaaaaggaaattctcaagcaaaaatactgttctatatggtagctagcttctgagatgccacccagcgatccttgtcctcctggtattcatggctttttttaagactcatctaagaatgaataggcatgatctttttaaccaataagatagtccagaaatgacagtgtgtgatttctgaggttaaactataaaacacaatgtagctttcaccttgttcttttggaacactttatgggggaccatcagctggaattctgtgtaaacatttagacagttctggggaaaggtacatatttaatgaattgaagcttcaaaagacactaccaatttgccagctctttgaatgagccattttcaaagaagatcccctgccccagtgaagtcttcggatgtctgtactcctgctaacaccttaagtgtaccctgtgagagacctcaaaagagaaccacacggccaaactgctcccaaatttctgacccatagaagctataagaaggccagctccgatggctcatgactctaatctgagcacttttggaagctgaggcaggggcatggcttgaggctaagaattagagaccagcctggtcaacatagaaagaccccatctttgcagaagagaaaaagaaaaaaattagccaggcatggtgatgtgcacccatagttttagccactcaggaggctgaggcagaggatcgcttgagcccaagattttgagagtgcagtgagctttgatggggccacagcaccacagcctgggtgacgagagtcagaccctgtctcagaacaaaaaaaaaaaaaaaaaagaaagaaactttaagatcaattttaattgctgttttaggccattaaatctctaagcaactcaactcaacaagaaaatatgattgtatttattgattgatttttaaatgttttactattactattatcagtagtagtagtagtagtaatagagacaagatctcactactgtgttgcacgggctggtctcaaactcctgggcttcagtggttctcccacctcagcctcccaaagtgctgggattacaggcataagccaccacgcttaactgaagatacaattttaaacctttatgcatgcaagtataatgtcgaaataaactaggtaataatttgcatacattttaatatatcattacagttggaaactttaacacaactgtatcagcaattctaatattgaccagccaaaaaacagtaagtacatagcaggttttataaatttcaaaagactaatgtcatgtaactatagtctttgactttagcacagttaagataggattcaatataaagataagaaccctctagtttgaaaatcaaaaatagacaccttaaaataacttatgtttcttttcttttttttttttttttttttgagacaaagtctcactctgccgccaggctagagtgcagtggtgtgatctcggctcactacaacctccgcttcccaggttcaagtgattctccttcctcagcctcctgagtagctgggattataggcgcctgccaccccacccggctaatttttgtatttttagtacagatgaggttgtaccgtgctggccaggatggtctcgatctcctgacctcatgatctgcccgcctttgcctcccaaagtgctgggattacaggcatgagccactgcgtctggcctaaataacttatgtttccaagaagaaatcataatggaaattagaaattgtttaaaaatgaatgatcatgaaaatgccacatatcaaaccatctggaataccactgaagtagaaacaaaaggagaagttaaggccttaacaagcttataatagagaggaaataacagtgcaaatagatgagataaacaactaaagaagtcagaaacagaacaacaaaataaacacaaagaaatagaaggaaagaagtcacaatgataaaaatgtaataaacaaggaaacaataatacaatagcgaatgaaaaatagggagtgaaaaacaacttaaaatttggaaacgcttaacaaaatgattccagaacacaaacaacaaggccaacacacacacacacacacacacacacacacatacacaaatcaggtaagaaaagtggggtataactatgatgcagcaggtattacaatgataatacagggacacgataaatagctttatacctgtacacttaaaacatttaaaatagtagttgtatccacaaaaatataatttctcaaaaataacatttgaagaaatagaaaaacttagtagtctgataaatcattaaggacttgaacccattgtcaaaaatctctccataaagaacatacgaatctgaataaatgatttcacaggtgcatctatctaacagttaaggaacctataatttcagtcttactttaactctttaaaagaacagaacatttgggaacactctacaacttatttaatgaggctagtgtaattttgatatcaaaccaacacaaaatacaaggaggaaaaatagtaggtccatctgactcaagcacagatgcaaaggcctatacaaaatattaggaaagaaaaactaaatttgtttataaaagataaatcatgatcacaggtttattatagaaatgcaaacttgattaagcattagaaatctactaatgtattcaccaaatttataggttaaaagtaaaatctatttcagtcatcttacaaatacagaaaaacaacctataaaattaatgtcaattcgtgtttttgttaaaaaagcttaacaacctaaaaatacaagagactatctttactataataaagtgcagctatcgaacttttttactaaatatctcattccatggtgaaacattaaaatccagagtaaatcaatgatgcctgttttcaccacatcaattcaacattgtactacagactggacccagggcaatggcaagagaaaaagcaacaagttattaggctctgaaaagaaaaaagtaatttttgttgttgttgttttgagacagtctcactctgtcacccaggctggagtgcagtggcatgatctgggctcactgcatcttctgcctcccggattcaagcaattctcctgactcagcctcccaagaagctgggattacaggcatgcaccaccacacccagctaatttttgtatttttagtagagacggggtttctccatgttagctaggctagtctcgagctcctgacctcaggtgatccacccaccttggtctcccaaagtgttggaattacaggtgtgagccaccacacccagccaaaaaacaaattttaatgttctatagaagataggacttcctattttaaaagatctatagaaaaatttttagtaattttttactataaaatccaaatatggcattcatgtgcatttgtatatatcaatagtctgttgctactgtcttaactttgaaatattctgttataatagcaacataaattataaggtacctcagaataatgggagaaacgcaagttttttacaagggagagaataaaattgtattgaaaaacattagaagacaaataaattaaaaaatatattgtaaataggaggacactgtttttaaaatgacagttttactcaaattggtttatgatttaatgcaattcctattgtctcaccaggacgtttcatgaaaactgactagctcatctgaacatttatgtggtagatcaaatggacaagaattactgatatgctcttgaaaaagtgggacaaggaaagacctcttgccctatcagatatcaagatctattttaaatctattataattattacaacgtattgttagtttagaaatatattgctgaaacagaatgctcggcccataaacaacccacacttctgtggaaactcactctctgagcctgctttgcagatcagtagggaaagggtagttgcccgaacaaaagatattgggaaaactggtagttaatatagaaaagatgaaactggatcccacctcacgctttaaattcaattccaattggcttaataggtgaaatttcaaagggacataagagaatatccttctgattacttttcatgaaataattagttttaaaaagaagcaaagctgtaaagagacactgaaacatatttaaagtttaaaatgagaactttgtccaggcacagtggctcacacctgtaatctcagcactttgggaggctgacatgggaggatcacttgaggccaggagtttgcaaccagcctgggcaacatagtgagatccctgactctacatagaataaaaaagttagctggacatggtggtgcatgcctgtagtcccagctactcagaaggctgaggctggaggatcacttaagcccaggagttcaaagctgctgtgagctatgattgtgccactgcatttcagcctgggctgagcatcagaaaaacagtttgttaaaaacaaataaacaaaagaaaaacttgtaggtgaacagacactataaaagactgcaatggcattccaaaagctgggagaaaatatttgcattgcccatgaccaacaaagtttcgaatataaaaagtcagagtcagtcaactacaaaaagaaaaccaaaagaaaagtgtgaataaggcatagacatttcatagaaatatttgtaaacatattcgcacgtatctataattagagaaaagtaagtttaaactgaaattcttgtgtcatactcatcatatttccaggtattaagtgtataacactgtcagcattagtgagcaacaggaactggcatacactttaggcaaagtgaatctttctacaatccctctagaaatctatttggaatcaatggtaaagtttagctataacactgagaaagcagttccactgctaagtatatgtcggggcaaggggccttaaactatctaggacaaaggaagaatgttttttaaaatttccagtcttttataaaatgtgacaaaaataaattattttaaaaaaggcttgaacccaggaggtgcagggtgcagtgagccgagatcacgccactgcactgcagcctggcaacagagtgagactccgtctcaaaaaaataataataaaaataaaataaaaaaagaaatgttaatacacttccagaaaacaataaatataaaaacatggacataaaaaatataaactcatttttatcattagattcggtagacataattatattttaataaaataatataaagtaacgctgatgaaaatatagttagacaaaccaaacaagttgttcattgaaagtgtgattattataaattaatataaagaatcactatcaccttttgtcattccacaattatttctaaataaaatgctatgagtgaaataggcatttcatatattttatgactgtaggagcactttgaatattcataatatgtaattaatagagtttttaatgtgacaaatgagcttgtttcttgcttgcttgatgtatctaaactggattgatgacaacacgaaattgttcccatattttgttacactaaatcaatttcacaacagcatgttgacaggtatgtacatgtaatgatgcatatacataaacatatgcatatttaagaaatcatgagttcactctcatacctccaattctaatccatcaccagatgaactttcttgccttttctcattccctatttgtctcttcttatacagccagatccctggctgccaataactataaaacatttattcatttgcttagtcctatattgacatctaaaactgtttcagaattacttccactgtaccactgtaaaacctaaaacaagttctggatatgttagaacattgtccctgtccctaacatccaaccctgctccagactgacggaatacagacaaataatgagttcacaggaaacttgattaattcctttctttcctctcaatctccctccctctttctctctcttcatccctccctcccttcctttcttccttttcagttatgatattcatttggaatacaatttaccttcatgcattttaccttgcttgctttctgttttatgtttttttttctgcttccattcttatttaatgtaatttttaaatatgtatgttatgctttcaaaagtaaaaacaatatatataaaagaattacaacaggactcacactctcgttatctcttctactctatactccaatcacatgtaaccaatttcagtgggattctttttcataaagattagcagatctatgtataatagtttttgcttttttctttcacgagtagggtaaatatatatgcttttctttttccttcactttgattttttttctccacttaattatatctcttgaaaggtactccaaaaccatttatagagatcttcctcattatttctttgtagttgcatagtactgcaccgtgcatgtgtattcattgtatatttaaccagcatcctaggcttggatatttaggcagtttcaatatttgcaattacaaacaatcttaaaataaataacattgtgcatatatttatcatggttggaggtgtatcttcaggattaattcatagtaatgagattaaagcatccaaagagtaaatgaaaatataattatttttaacttttatacaaaattaacccatggagcctgggattacaggtggatgccataattatttagtattttcaaaattcattttcaaatctccatccataacctattttaatttatagttaaatgatgaattttttacatgtctgcattttgatgaaaagtaaattccaaagtactctatcagattcataggattcaatgataattttttgctgatgtgcagtatcaagatcttcattgataatattgttaaattataggactcatcataataatctaaaaactttgttcttttaggcttctgactttcatttttgttttttatctggcattaaaaaacatattacattttttcttagaaagaagtgtaaacagcaatgaatatactaaagataaagacaatgaagtaagtctggcagtctcaatcacatctttacttgggatcaaaatggtttaataattgcaaagatattaagagttcacatatattaaatcatgtcaaaaacttcaaacattctctactgaacattttcctttattaagcattatatctccacattagtttttttaaatacaataagcttacatgttataatcataatataataatttctaccttaaaactgttttttagagaattcagtttttactacataactaagacttttttttatagcaagtctttcttggtgaagcaaccagaatattgatttctattgtcatgaaagctccttaaattttttttttctttccagtttccacatacagtattgaaggtgaaagcttcttaatctgcataactatttcagaatattgtcttgtcattgcaactgtaccatcagaacattatcttaatgaaacttaaactcccaactattatgtcaatgcaatccttttcagttttacaaatccatagctggttgtttctagtcatcaatgacattgagaaaatacttctttatatcaccagcctatacagtttacacagagattaaaatagttgccaagttagtgatatttttgcattcatccagttcctagctgtatttgttctgtgagtgggtccattatttttcttcattttctgtagtgttttaaagtatgctgtcattgaaaagtgggacttgagctactttctttgcagtggttgcagctatcatttctaacacacttttgatgcagtgtttcactaatgtctcagcaatttttaatgaatttttagctttaacaacaccaactgctttttaaaaccatctatgaattgtttatgtttaaataggaatatgtatagtttcacagattgccagcaattatggctaaaaaactaaatcaaatatatggaagataatgttttatttctttgaaattgtttatttttcattattttatttagtgttaccactacattctgaaaaggtataccttgtcctgaccaaaattaaaggaaaaaaggtgaagcttatactgctgtcaataaattaaagattaaaactaaatacacaaattttacagccctaatttagctaataatgttaaattataaattttaaaagtaggcttaattttaaattaagactatacatgtatgtataaaagtatatgtcctcattttatcccatttttatacacttcaattaattaatttcttcttattattcttattatttttgagacaggatcttgctatattgcccaggctggagtgcattaaagtgatcatggctcactgcagcctcaacctcttgggctccagtgatccttccaccttaacctgagtagctgggattacaggcaggcaccacaatgcccacctaaattttaaatttttttgtagagataaggttttgctatagtgctggcttatacacttttagattgcagttcccaatctaattttaaaaatattgcgtggttctattgtgcatgacttgtatgtgtgttttttagagtttttattttattatcctaagaatacttaacatgagagctaccttgtaacaaatttttaatttttaatttctttaaagccaggattagaactttttttttttttttctgagacagagtctttcaatgtcacccaggctaaagtgcaatggcacagtctctgcacactgcaacctccgtctcccaggctcaagtgagtctcacaccttagcctcctgagcagctgggactgcaggtgtgcgccaccacacccggctaatatttgtatttttactagagatggggtttcgccatgttgtccaggctgatgtcaaactcctggcctcaagtgattgccctcttcagcctcccaaagtcctgggattacagatgtgagccaccatgcccggcctttataacacatttttaagtgtacaagaaaatattattaactgtaggcataatttacagcagatcttgataactgttttttgtcataccgtgagttcaacattatcaaactagcgaagtcctattaaatgatatgagttcactgattctgtgcttggatattatagcaaaaccagattacagttaaagtttctaaatgcttgctcttcatttctgtacttatcccatcacaaacttgtagcaaacaatcagcgaactggcttgggtccacagaccacacattgatttttgcacctggaaacatacactagaatatttatagcagcactgtttgtaaaagcaaaaattggaaacatcccaaatgtccatttatagtagaatggataaatgcattgtggtatattcacgtgatgatttactataaagtagagaaaataaataaagcattcttgtgtccattaacatagatgaatcttataaacacaatgttcaggaaaaaaatcaagtcagagaagaatgtattacagtaatattttatttatataaagattcaaaagagaaacaactaaatagttaattgttactaaccatagatatgtggttaaaactcaaagaaatgcaagaagttattatcacaggatagaaattaccccagagagtggagattcaatcaagttaaggtacccagggcacatcgaaattactgttcattctctactttatagcctgggtatcgggtatatggatatttgtttcattgttattaaactgaacacatattaaatattcttttgcatatatattttataataaaattactaaaattataaataggcaagacttttaaaaaatatttttgaaatacatttaaaaacatgtgaatggcccagcgcaatggctcatgcctataatctcagcactgtggaaggccaaggtgggaggatcactgaaccccaggaagtcaaggctgcagtgagtcatgattgtgtcactgtctccagcttgggcaacagagagagacctggtctcaattaaaaataaatttaaaaataataaaatatgttaaaaataggaagacattcctagatgggaagataaataatcacaattatgcatttgattcaattccaatcagaaaaataattaaaaattaatacccataaatatttcctaaagcctgcaggagatggggatcattattttatattgagtttgaatatagaaatttgatcatgacaatataaaaacctggtttttaaggtgttcagggataaaaataaaataaaatgcctatattctgtgagtctgccagaacaactatagaacaagtaatgatcagatgaccatgactggaaagcatgacagagcacaggaatgctcaatctcacactctactatgtattgccttcgtgatctgaatgtttgcatctccccaaaattcatgtgctgaaatcttaattctcaagatgatggtattaggagggtggggcctttaggaggtgattaagtcctgagggctctgccttcgagaatgggattagttcctttataacagaggccctagaaatctagctagtctcttctaccatgtgagggaacaggagaagcagccattatgaacctagactgggccttcaccagacaccaaatctgctggtactttgatcttggacttcccagcctccagaactgtgagaaataaattcctattatttataagcaacctaatttatggtattttgttataccagcctgaaggaactaagacacttaactattttaatcaaatcacttaactgcattatccagttttccagtctctaaaatgagaataacattagtattaataacttctgaattattgcaataattatatgacaaaatacatattaaaaggataacaagttatacgttggtagtcaaaaattatttattttagcctcataatgaagaattctataaaatttaaagtattcgatgttttactttgttttcattttgagatgagagtctcactatgttgcccaggctggttttgaactcctgggctcaagtaattcttccaccttagtcaccagagtggtggggattacaggcatgtgctctgggtccagtgtatttgctggtttacttatgaaaagtaagaacatgtgatatatatggcatgtgatttttttcacctatctatattgtgtacattcttctatgtcaatcttttttgtagttgtaataaatcagtaagttgtaattcattttatgtttatcatttgaccaaataaaatttaaaaagtcatccccctctccatagtactcaaaaagttgggaactgtaagtataaataaataagggtgacttgtcaaactagatattaattaaactctaaagctataataattaaagctctatgatactggtttgagaaatgaagaatagagcaatgaaacaacataaaagctctgaaagaaaacctagggcagccagagagaaaggtcgggttaccctcaaagggaagcccatcagactaacagcagatctctcagcagaaaccctacaagccagaagagagtgggggccaatattcaacattcttaaagaaaagaattttcaacccagaatttcatatccagccaaactaagcttcataagtgaaggagaaataaaatcctttacagacaagcaaatgctgagagattttgtcaccaccaagcctgccctaaaagagctcctgaaggaagcgctaaacatggaaaggaacaaccggtaccagccgctgcaaaatcatgccaaaatgtaaagaccatagagactaggaagaaactgcatcaactaaccagcaaaataaccagctaacatcataatgacaggatgaaattcacacataacaatattaactttaaatgtaaatgggactaaattctccaattaaaagacacagactggcaagttggataaagagtcaagacccatcagtgtgctgtattcaggaaacccatctcacgtgcagagacacacataggctcaaaataaaaggatggaggaagatctaccaagcaaatggaaaactaaaaaaggcaggggttgcaatcctagtctctgataaaacagactttaaaccaacaaagatcaaaagagacaaagaaggccattacataatgataaagggatcaattcaacaagaggagctaactatcctaaatatatatgcacccaatacaggagcacccagattcataaagcaagtcctgagtgacctacaaagagacttagactcccaaacattaataatgggagactttaacaccccactgtcaacattagacagatcaatgagacagaaagtcaacaaggatacccaggaattgaactcagctctgcaccaagcggacctaatagacatctacagaactctgcaccccaaatcaacagaatatacatttttttcaacaccacaccacacctattccaaaactgaccacatacttggaagtaaagctctcctcagcaaatgtgaaagaacagaaattataacaaactgtctctcagaccacagtgcaatcaaactagaactcaggattaagaatctcactcaaagcggctcaactacatggaaactgaacaacctgctcctgaatgactactgggtacataacgaaatgaaggcagaaataaagatgttctttgaaaccaacgagaacaaagacacaacataccagaatctctgggacgcattcaaagcagtgtgtagagggaaatttatagcactaaatgcccacaagagaaagcaggaaagatccaaaattgacaccctaacatcacaattaaaagaactagaaaagcaagagcaaacacattcaaaagctagcagaaggcaagaaataactaaaatcagagcagaactgaaggaaatagagacacaaaaaacccttcaaaaaatcaatgaatccaggagctggttttttgaaaggatcaacaaaattgatagaccgctagcaagactaataaagaaaaaaagagagaagaatcaaatagacacaataaaaaatgataaaggggatatcaccactgatcccacagaaatacaaactaccatcagagaatactacaaacacctctacgcaaataaactagaaaatcgagaagaaatggatacattcctcgacacatacactctcccaagactaaaccaggaagaagttgaatctctgaatagaccaataacaggagctgaaattgtggcaataatcaatagtttaccaacaaaaaagagttcaggaccagatggattcacagccgaattctaccagaggtacaaggaggaactggtaccattccttctgaaacaattccaatcaatagaaaaagagggaatcctccctaactcattttatgaggccagcatcattctgataccaaagccaggcagagacacaaccaaaaaagagaattttagaccaatatccttgatgaacattgatgcaaaaatcctcaataaaatactggcaaaccgaatccagcagcacatcaaaaagcttatccaccgtgatcaagtgggcttcatccctgggatgcaaggctggttcaatatacgcaaatcaataaatgtaatccagcatataaacagagccaaagacaaaaaccacatgattatctcaatagatgcagaaaaagcctttgacaaaattcaacaacccttcatgctaaaaactctcaataaattaggtattgatgggacgtatttcaaaataataagagctatctatgacaaacccacagccaatatcatactgaatgggcaaaaactggaagcattccctttgaaaactggcacaagacagggatgccctctctcaccgctcctattcaacatagtgttggaagttctggccagggcaatcaggcaggagaaggaaataaagggtattcaattaggaaaagaggaagtcaaattgtccctgtttgcagacgacatgattgtttatctagaaaaccccatcgtctcagcccaaaatctccttaagctgataagcaacttcagcaaagtctcaggatacaaaatcaatgtacaaaaatcacaagcattcttatacaccaacaacagacaaacagagagccaaatcatgagtgaactcccattcacaattgcttcaaagagaataaaatacctaggaatccaacttacaagggatctgaaggacctcttcaaggagaactacaaaccactgctcaaggaaataaaagaggatacaaacaaatggaagaacattccatactcacgggtaggaagaatcaatatcgtgaaaatggccatactgcccaaggtaatttacagattcaatgccatccccatcaagctaccaatgactttcttcacagaattggaaaaaactactttaaagttcatatggaaccaaaaaagagcccgcatcgccaagccaatcctaagccaaaagaacaaagctggaggcatcacactacctgacttcaaagtatactacaaggctacagtaaccaaaacagcatggtactggtaccaaaacagagatatagatcaatggaacagaacagagccctcagaaataacgccgcatacctacaactatctgatctttgacaaacctgagaaaaacaagcaatggggaaaggattccctatttaataaatggtgctgggaaaactggctagccatatgtagaaagctgaaactggatcccttccttacaccttatacaaaaatcaattcaagatggattaaagatttaaacgttagacctaaaaccataaaaaccctagaagaaaacctaggcattaccattcaggacataggcatgggcaaggacttcatgtccaaaacaccaaaagcaatggcaacaaaagacaaaattgacaaatgggatctaattaaactcaagagcttctgcacagcaaaagaaactaccatcagagtgaacaggcaacctacaacatgggagaaaattcttgcaacctactcatctgacaaagggctaatatccagaatctacaatgaactcaaacaaatttacaagaaaaaaacaaacaaccccatcaaaaagtgggtgaaggacatgaacagacacttctcaaaagaatacatttatacagccaaaaaacacatgaaaaaatgctcatcatcactggtcatcagagaaatgcaaatcaaaaccactatgagatatcatctcacaccagttagaatggcaatcattaaaaagtcaggaaacaacaggtgctggagaggatgtggagaaataggaacacttttacactgttggtgggactgtaaactagttcaaccattgtggaagtcagtgtggcgattcctcagggatctagaactagaaataccatttgacccagccatcccattactgggtatatacccaaaggactataaatcatgctgctataaagacacatgcacacgtatgtttattgcggcattattcacaatagcaaagacttggaaccaacccaaatgtccaacaatgatagactggattaagaaaatgtggcacatatacaccatggaatactatgcagccataaaaaatgatgagttcatatcctttgtagggacatggatgaaattggaaatcatcattctcagtaaactatcgcaagaacaaaaaaccaaacaccgtatattctcactcataggtgggaattgaacagtgagatcacctggacacatgaaggggaataccacactctggggactgtggtggggtggggggaggggggagggatagcattgggagatatacctaaggctagatgacgagttggtgcagcgcaccagcatggcacatgtatacatatgtaactaacctgcacaatgtgcacatgtaccctaaaacttaaagtataaaaaaaaaaaaaaaataatgtgtcagtcatgatacaagatgatttaaataaaagacctctttaaaaaaaaaaaaaaaacaaataccttaaaaaaaaaaagaaaacctaatatttatacgtttctaatataagattatatgatgtaagtataatatgtgcttataatatgttattgtaatatgtataagggggaaactgataagtactgctggatactgttatgaatattcattgggaatgaaaaattataagtgaaatattcagaaaatttttaaaaaacacctaaaaggacaactatctatctgatcttgggataaggaaaattttccaaatataaaagcaaagtaagaaattataaaaggaagtaatgacagatttgatgaaagttaaacatttaaaaaatacataggactatatcagaattatacaaatcaagcaacctgttgacattattttctatattacaaatgtagatttagctccctaaaatgcaaaggactttgtgaattaagaagaaaatttctcaaacctcattaaaaatgacaaagaaaatcaaatagcataatttcacaaaaactgagatttgggggggtatagcagttagaatgaagatcatgttgctataattaaagggccccaaaaagttgtttaaataaaatagaagtttctttctcatgtaacaacaccaaagtccctggtctaggttggatggtatttgtatttcacaaggttatttggggattcagactgcttctatctttctgctttgctatctcctagggcagccattggcaatatttttttgtaaagagacagattataaatactgtagaatctggggtctcatatggtttctgttgcagttactctattctgcaattatagaattaaagcagctataaacaacacataaacaaatggttatacctatcttcctataaaattttgtaaatttggtttaattaactaaaaaaacaaatttttggtgtactacatgatgtcttgatatatgcatacactgtagaatgactaggtcaagctacttcatatatgcattatctcagtaatatatatatatttttttctttttttttttttttttgagacggagtctcactctgtcgcccaggctgtagtgcagtggggcgatctcggctcactgcaagctccgcctccagggttcacgccattctcctgcctcagcctcccttgtagctgggactacaggctcccgccaccacgccaggctaatttttttgtatttttagtagagacggggtttcaccgtgttagcccggatggtctcgatctcctgacctcgtgatccgccccccttggcctcccaaagtgctgggattacaggcatgagccaccgcgcccggcctatctcaataatattttttgttgtgagatttatgatactggtttgagaaatgaagaatagttaaaatctacttaaaatctattctcagcaatttttaagagtacaacatattgttactaactatagccccccgatgtatgtatattcttcctgtgtaactaaaattttgtgtcctttgacaacaaatatctccccaatccttttattccccaccaccttagcctctggtaatcaccattttgctgtctgtttctgtgagtttgatattgttagagtccacacagaagtgtgatctctgacagatgtctttctgtgcctgggtgatttcacttaacacaatgtcctccaggttcacccatgttgttggaaatgataaaattttaatttttaaggccgaataatattcaattgtgtatgtattcgacattttctttatctgctcattgattgatggacacttaggttaattacatgtcttggctattgtgaatagtgctgcaatgaatatgggtgtgttttggagggatctcatatatttgatccaattccaatcagaaaaataataaaacaaaaatcaaatattaatagccttaagtattcctaaggcctgcaacatactgatttcatattctttgaatagatacacggtagtcagattgctggatcatatggtagttctatttttaattttttgaggaaactccatactgttttacctaatggctatactaatttacattctcaccaactgtgtataagggttcttttttctccacattgtctttaacactagtggtctttcatcttgatattgataatagccaactgacaagtgtaaggggatatctcactgtggttttaatttgcatttccctgatgattagtgccacaatttgagtgtgtcccccaaagttcatgtgttggacacttaatctgcaatgcaacaagtgttgagaaatgggaacttttagaggcgtttaagtcctgagggctctgtcctcataactgaattaatgttactatcatgggagtgggtcattatctctagagtgggtttgttagaaaggtgagttcagagttctctcgctgtgtgtcttgtgtgctttcttgtctttccaccctccgccatgggatgatgcagcaaaagcccttcaccagatgccagcatcttgatattagacttttcagcctccaaaattgtgagaaataactttctttataaattatcaagtctgtagtattctgttatggcaacacaaaacagactgagacaattagtaatgttgaacattttttcatatactccattggccatgtgtatgcctttttttttgagaaatgtctattctggtccttcgcccattttggggggattacttgtttttgttttgttttgttttttgtctttgctattgagttgtttgagttccttacatattttgttgtatagcttgcaaatatattctcccattctgcaggttgtccctttactctgttgattgtgtccttggctgtgcagcgctttttagtctgatataattccatttgtgtatttttgcttttgttacctgtgcttttatagccatatccaaaaaaaaaaattattgcccagagaaatgtcatggagcttttcccctatgttttcttctggtagttttatagtttcaggtcttacatttaagtctttaatccatgttgagttgatttttgtaaatggtatgagatgaaggttaagtttcattcttctgcatgtgaacattcagttttccccagcaccatttattgaagagactgcccttttcccattttgtgttcttggcatctttaatgaaaatcaattgatcctaagtgtatgcatttatttctggactctttattctgtcccattggtctatgtgcttatttttatgccagcaccatgatgttttgattactagagctttgtagtagattttaaaatcaagtagtgtgatgcctccagctttgttgtttgtcccttaaaactatttacaagacagacaatttggtagttttatggcttttgctctagggccttatcttgttctgttaggttggagcctaatcacaggcacacctgtactccagcttccaggaaggagtgagcatggaagatttcatgcacaatgtctgaaggcccaggcacctaagtagcaaacattacttctgatcccattccattggtggaaacttagttccatggcttcactgagctgcaagcatggctgggaatatgatcttcacttccaaagtgcccaattacaaatcttttgctgtggaaggagggagatcatatgttagggaactactggatgtctttgccaaactggtattcaacaaattcaaaataactttacaattttataataaataatataaataaatatttctaaagaacaaaagttataatattcattgttggtattataccatttctagtggttacagtagtaatatttataataaacgattgttacagtattagtatgtgtccaacaccacagtacatgatttatagactattttattcctaacacaacctcaaggtttgtacacatttattgtcttcactttccaaataagtatctttttaatgagtttcaagactaatgtggctgggcacgttggctcacgcctgtaatcacagcactttgggagcccgaagcggggggatcatgaggtcaggaaatcgagaccatcctggctaacacggcgaaaccccgtctctactaaaaatacaaaaaattagccgggcatggtggcgggcgcctgtagtcccagctacttgggaggctgaggcagggaaatggcgtgaacccgggaggcggagcttgcagtgagacgagatcgtgccactgcactccagcctgggcaacagagtgagactccgtctcaaaaaaaaaaaagaaaagaaaaagactaatgtatgcaattagtaactgtttgagccatgattccacatcaggcagtcctattttaaagcctatgctcttcactattagataatcaaaatatgaacacttttatgaagagtgaatatgtttgcttttccacttgaatgagagattattgaaggcactctctattattaattttggttcttgagcacatggcctggtctatattaggtagatttagaataaattaatgaggaaatgaatgattatgtaaatttaaaaaggttaagtgattgctaaagttcacctagagaatagcaatcatgtcaggccttcttaactttagtttcctattttctgtgacaggctgttctaatatctgtaaccagactccttgtttcaggacagtaggcatatgcctgtgctgttccttgccagaagcagaatggcaccaagactaattacacttatttgagcctcctggtgagaggtgaagccagctggacttcctgggtggagtggggacttggagaacttttctgtctagcaagaggtttgtaaaatgcaccaatcagtgctctgtaaaaacgcaccagtcagtgctctgtagctagctagaggtttgtaaaatgcaccaatcagtgctctgtaaaaacacaccaatcagtgctctgtagctagctagaggtttgtaaaatggaacgatcagcactctgttaaatggaccaatcagcaggacatgggtggggacaaataagggaataaaagctggccacccccctgcccccccgccccgtagccagcagtggcaacctgctagggttcctttccatgctgtggaagctttgttattttcctcttcacaataaatcttgctgctactcaatctttgggtccatgccatctttaagagctgtaacactcactgcaaaggtctgcagctccattcttgaagtcagtcagaccacaaacccatcagaaggaaccaactctggacacactgggactaagaccttgatctgtcttcttcgtgagcaagttatttcatatctctgatcctaatgttttttgctttgttttgtaaaataactaaaaataatatatatcacacaaggttggtgtaatggactgaatgttcctgtccttcccaaattcatatgttaaaatccttcccaaatttatatgttaaagtcccaatgtgatggtatttggagatggggcctttgggaggtaattaggattagaataggtgacacagtggggctctcatcatgagattaattgctttataagaagaagaaatttctctctctctctctctctctctctctccctccctccctctcttcctttctccctccctccctccctctcttcctttctccctctctccctctcctcctctcccccactccacatacagagaaaaggccctgtgaggacacagcaagaaggcaactatcagcaagccaggaagaaggccctcaccagaactcaattctgctagcaccctgattttggacttacagtctcaagaaccgagagaaataaaattctgttgtttaaaccatccagtctatagtactttgttacagcaaactgagctaattaagataggtgatactgagggttaaatgagataagtataaaatgtttagtacatttcccagtacatcgtaaaacctcagtacatgcagttcttactatcctgggcattgaatggtgtgtctggtacttggtacccactaatagtaagcacacagtagtccacttgttgcctttctatgtcatctccaactgtttaccacttccttgctctccaaccacattggcctacctgaagtttccagaagacacagagcttgttgctgtgtcaggcttctacccgctgtgcttgccacagaaggcctcttctccctatttgctcaggtctcttaagtgtcattctcttagagtggccttcttaattagcctacccaaaataaccctaatcactctatcacctcatccttcttcatttctcttcattaagcagtcactgacatttcgattaatatatttagttatttttgtggtatccctgttgcttaccagaataaggtccatgagggcagggaatatccccagtgctgagaagagtacctagcctatggtatcattaaacctatttttgagtgattgaataaaaggagttttataaggaaatgcttctagtaagaaacacactatatagaaacacacgtatatatgttagcattttggaaggaatgcttgccattcatatataaaaattaagataaaggtttttagtctctcattgtcctcacatcatcccttttgtgtaaataatacattcattaaatgtattattctatctcatcaaaaatcaaacaaataactcatcttccaaattaagtatatcaactctcaaaatgataaaacattgatttaagtttttggagaccgacttcctaacaaattagtactagattatcatagtctttttgtaaaaacaaaatgtagttcctgaaacatacaatttttgaaactttttataaatttaagcattatattccatatacctcttccaactgtctttatctagaaagattgtatttgtttttatttaatcatattgcttttaggcagataggaagtgattaataattaaaaattaatttccataaagtgttggtatctttagttacacacaggccacaatgataatcaatgtggtgagtaatgtttaggtactgtgctccagagaacaattcaatcaattgccccaacctggtgtttcctgttatgcatgaacttggggaactataattttctgaataattcaacttaaagcaaaatgaaatgtgtgagtaattaagaaaatgttcttctgctaatatttattctgataaatcatttcagttctgtttgattttgcagacactccataatatcattgaattagtaaaatataataactcttaaaaagctcatagaagtgattattgcctctatattttccagtaagatgttaatttttttaaataaccgtaatgtactgtgaatataatttcttctacaagttacttttgctgcttctaaaatactagtggtagcagtttgcatactttctgtataaagactgatttgatgtcatctctgaatcacaaaaaaaagtcaaaccaaaacggaaaggtcttaatttaattaactaatagaatcattactaattctatagaattagatattttaaatcagagctagctgcaacaagttatacgagctttgccattttatgaacataatttgactaagcggttatgagatctgtaaagaacacttcttatctgagtatagctggggacgtctttgttcagaagtacacagaattttataaacctgtccagagcttcatatatatccagtaaggctcattttctacatatttgagatcttattctctgtataagatctttacagggtagtgcaaaattcgacataatatttatattatgaatgaagaaacaaacagaaaagaagagaatgaatctcaaattcattgagtacctactaagaatgaaaacaaaaacatttgaaagtggtatatggcctgagatgtaacacagtttgagaagaaatttagggaatagtataagcatttgctgatttgtacacttgaaatattgtttcaaaaaatcccttttttatcttcctgagagcatggtcctctgaagagtataacttttcctgtgttattggatcacttagttttcatttcaaggttaaatttgatgttttatcttgtttgggccatttttaaacctgatttattttatttttaaatagaacataaagcattgactcaaatatttccttagaaagggtgagaatgatagtctttccaggttggtaaccaaaatctattcctaatcttcagaagatggtaaaattaacattctatataaaagtcccatagaataaagaatattttatttatttaatttattttaattaattaatttttattattttgttttgagacagagtctcactctattgcctaggctggagtgcagtggcatgatcataactcactgcagcctcaactgcctggatttaagcgattcccccacttcaggctcctgagtagctgggaccccagacgtgtgccaccatgcccaaaaaaataaaaaaaaaattatttgtagagatgaggtctcactatattgcccaggctggtcttgaactcctcagctacagcaatccttctgcctcagcttcccaaagtactaagataaggtgtgagcacctggcctaagaatattttaactagttaatttggttaaatatttataatagtctctaatatatccagaacagatccattggctaatgaattgattcagtcatttaccaagcatctgaagcattcagaacagatcctcaggctctttattatagctgtagactttaatccagttgtaaagaggacccacatacatcagttttaaaaacaaggaaccacacctcttacataccacataatctaaaagaaagtgatcagatgaagatttgtattaatgctctggcaccatgttccttatttgacataatcaggtggttccttgacttgtcaggtggctttatatgatccttaagatagaagggagattggtcactgtggctatacaccttatgcctattcctctatacacctctgagataaatatttttaacactgttatttaactaaactgaacgtgtccaggatgagacagcaagtaacatggtatcataattaaaacctgagtctatgtgactctaatgacattcccctagattttactaaggattatttgagtagagaggtagtatcttagagaggttggaaattccttggagcctgacatgctgcagtgaatctaataggtggatcttctgttgtttgctatagagaatacttctgaaaggcatgtggaatatctagggcaggcatcaggggcggtgggggtggtggctgctcaggtctagctctgcataaagatatttttctcataagagcattgccatagagtaagacatttactgtagacagggatgcaggaatgtatgttaattacatataatattatgtgtgcgtgtgtgtgtgtatgtttatattgtgaggagtgagatgatggtcctttgcagtagagaacaaaaaagaaagataccaattttgaggaaaatgtaatgagttattctgttttttatatatatttaattttttgtagaggcaaagtctcactatattgcccaggctggtctcaaactactgggtccaagagatcctttcacttccaaagtgcttggattacagagtgagccaccatgccaaacttcagttatgtcttaagactagcctgctcactggtaggtggttaggtttagatatgtacatttaggaggtaataataaaagtagctgctcctattgtacatacaatcactgaatgaatgtatatagagataaggaaatagataagagagggttaaataccccgtcttggattaagaataagaggaaaatgtgaaacccactaaggagatgagaaaggaaaaaaatcagcagaaagaagactactgttggtttatgtttaatggtctaacttttttttttttttttttttttacttctaaggaagaatagttgtcaaaatgagggaaactctaaagataaagacacactcagactgattttcaaagcttcattttcccaaatgatacaggggtcaaattttcataatatctactcagacaacaacaataacaaataaacaaaaactgttttgtctttgagcatgaaaaaacgtaaaaatgttcctactatcccctaagtttcttgaaggcaggaattgtatctccttaatgtctttgtttcctaaatgcctggtacatgtgaattgaatttacgccttcatggaaagaagcaataacctccacttacaggttggcattcaggggcatagttcaggttgcgtcaacatcataactgggtcaaagttaagaatacagttttcatctcatgtgtgtttttaaatcaaaagtgaaaactaaagagaataatgacaatctttcttctattttatttttctaatgacttatattttaactgctatttaatggatatgatattaatgaaaacattctgattatccttaataatgtacatttttaaaggtcagtaatggtctttatctcaggcaataaagattatgaaacaaactactgtaattatattcaaactagaatatgaaatgttaggcattttacaatttttcccactattttttatttgcttacagtgactacattcattcaacaaatgtctgtctatctagctatttcacccttcaggcagagtgggattatataaaggaaggtaattcctattccgtagtaggaaggaactctctactagctaggtaaataacacttatataaaatttaatagaatgttagctaaataataacaccaaatgtatctcagcagtatatgactgcattcttagtcagtgtaatattcataaagtgtcatgagttcttaggaaagaaaatcactgtggcctatcaaaattatgaagcctaatgtacatgcagaattttaaacttgtgcctaaattcttctcattatgtagcaaaaactgatttctctgtgctatacaaataaacctacaaaatgtgatcaggaaatcaataagagaatgtaaaaaatagttcatttattgagtgataggattctggatcataaaagatttattctagtcttgatgttataagtcttgagttcatacttggcttgtgtagtagtgtttataaatgacctgtatagtttgacttcatttagaaaagacaagtgaactctgctatatcctcatgtgaaacccaggagctaatctgtatacatcttcattctagaagtgttcattcatttatgcatttagtcatgtacacatttatccttacttatccattgatgtgattcagacccagatgatctggtggcagcatggacaggcacttgtcttcagaatgctagccacctagaaaagccctccaggactctactcagagtccaaaagagttgtttttcaagttacatagttgtgtcttaaagtaattcacatacaaatggaaaatcatacaccatggaattacatattaaatcatttttccttagttatattttatattttttagagtgatcatagttttccatgagaatttgcctagttgtgaggccttgtagatactaattaactcatgctgtatgatgattctgtataaagaaagcttaaatcaatacgtacgttctgaagaaaaaaaaaatctctttgcagtacacaaagagaaaaaaacaaacctaaaaagagttcctgaaaatgactagtaactaagtggtttgaaagagttaatattgtttcctacaggcctgattaataaagacattacctatccctatattgaaaaagtggacatggtttctagttctgtttcaggttgatttatgtggggagagtgtgatgacatttatgtactaaatacttagtgcttttaattcagtttacatttaatctataaatgcaaaccatgttaaaggatgcttgacaaaaataaacttgaaagccagcattaaccttccaaaccagctgaaggtgcttaaaagacaataagggtaaaatttcattatacagacttcaagtgggtttttaaaaaatctatagactttccaactaaaatgatgaatgctgttctgattctaattgacaagtgttatatataaaagagttcttgccttcattcttatcaaaactgtggggatttccaatgataggacaatattatgtgggtggaaacttctcagaagaatagagaacttatcagtatttacttaggttctattacattcagagccataaaagaaactacactcataaatttatagacagtcaaggatattgcctcttccccaaagaggctagatattaaaggagtggagcgaatgagctcaaatcatgaagtggtttcaatattggaagagttttcccccttcatatttcaacttgtaactaatatgttatgaagaattgctggctagctaactttgagggtttggcagaagaaaacagtcttcaccactttttcttacaaatgttctttttcttctacaattagtacttaatgataatatcgaccctttaatgagttactgtagattaatgattaccacacttgttcaaatatatttaggattccaactttgcagataaagaaagaggtttatagaggttaagaatcttgcccaaaatcacacagcagggacaagatgtaagcctgtttttttctttgcttcctatttctgctgtcacaaattaccacgaactgagtgttgtgaacaacacaaatctattattttacagctcgaggtcagaagtacaaaaggggttttactgggctaaaatcaaggtgtcaacaggggtgcattcctctgaagaagccaggaaaatctttttccttcccttttttagcttccagggtcttcctccattttttggctccattccttggccccttccgccatcttccttcttcaaagcccacaatttcattacccaacctcagcttctgctattacatctccttttctgacccttcttcctctctttttcatcctttaaggacccttgcgattatatcagacccacttagataatccaggacaatctcctctatttcaaaacccttaatcacatctgcaaagtcacttttgacatttaaggtaacattcagtttctaggcattagggcaactgtgagaggccattattctgcctactacaaaagctaaagatctgggtaagtatagtgcagttgtgtgcatacagcagttctcctttatctgtgggggatatgtcccaagaccccaagtagatgcctgaaaccatgaatagcactgaactctgtatatattatgtttttttcctatacatacatacttatcataaagtttaatttataaattaggcatagtaaaagattaacaacaattgctaataataaaacaggacaatcacaacaatatactgtaatagaagtcatgtgaatatggtctctttaaaaaaaaataaatatataaatatataaatataaatatatatatatatatatttttttttagatggagttttgctcttgttgcccaggctggagtgcagtggtgccatctcagctcactgcaacctccgcctcctgggttcaagcaattctcctgcctcagcctcccaagtagttgggattacaggcatgcaccaccatggctgtctaattttgtatttttagtagagatggggtttctccatgttggtcaggctggtctcgaactcccaacttcaggtaatctgcctgccttggactcccaaagtgcagggattacaggtgtgagccactgcgacaggcctaaaatatcttactgtactttattcacccttcttaggcatatccaaattgtcagtactattaactcttgccctttggggccattattaggtaaaataagatcaactgtcacagtatcacagtgattgtgttacttgaactgtgacagttgatctgatgaccaagatggctactaagtgactaatggctgaatagggtgtacagagtggattcaggacaaaggaatgattcacatccagagcaggatgacatgaaatgtcatcatgctactcagaacagtgaccatttagaacttatacattgtttatttttagaattttcagtttaatatttttagactacagttgactggtgttaactgcaactgcagaaaacgaaaccttggataagggaagactgttgtattttgatattaatatgtcaatataatttagtagagaaaaaatacaatcacagagattaatgatcactacaatgattacggtagtgtaatataatagaaatagctttgaatctggaaaaattctggcttcatcatttactaactgtataacatcagataaatatcttagtgttgtctctttagaggtgatgtggtggtgagttataaggaatgttgttccttctccttcatttttagaaaataacaaagatagagaaggcagacaatatagtacatgttgtacttagatgttataagtaatgtctaataataattacatttgcaaaaactattttctaaatatattaaacattttgtgggccttatttttattttacaaataatattctgctgctcaatgtgctctttttgttcctcctctgatattcaatgtctgcttgtttttttgttttttttttttctgtaatgcctcttaaatttaggaatctgaattaattcattagcttgatgatggctttttctcattccattttaggaacttaatttttagcatgtaattttctgtattgttgtttgctggtataggtgtacaactagtattttttatgaaaaacaaatcctgcattagccttttaaaaatcatttataaaataaatcccaacctcatattataggaaagttatgatataaagtatcacctctgcctcgtcattccctcactttgatcccattctcagagggaactcctaactgttgggttttaattctttttctttagaatgttaccttataattcttgatcacatgcttgtcaactttttaaacaattgttgactcctgatttgaaaggctaggatctggccaatttaattacaccatctttccttgcccctcctttcaatatttgacatttatattttaaattttgttcttctattgtttacttttacaactgaaaataatatgggtaagcattcattttttttttcaacagagtctatactcttcactttccagataaggtattaattctcctactcatttcctcaagttttcctttcttcagcagcttaactttggtcaggtgtcaagtttgtttatatttacagttttcctataaccacctccaactattctttttgtgaatatgttgatttttttttttttttttttgagacagaattttgttcttgttgcccaggctggagtacaatggcatgatcttggctcaccacactctccacctcctgggttcaagtgattctcctgcctcagcctcccgagtagctgggattacaggcatgtgccatcatgcccagctaattttgtatttttcatagagacggggtttctccatgttggtcaggctggtcttgaattcccaacctcaggtgatccacctgcctcaacctctgaaagtgctgggattacaggtgtgagccaccgtgcccggacacattgactttaaagttggaaatgtatgaacaacattgccaaaccacaaatattatttgatgctgagtcacatagtgtactatgttctttgaagtagtttcactctcaggaaacctagggcactcatgggaacaagttcaccatgtgaaaatggattctctctcttttttttttaactcaattgcttgaaatcatttcaaatttacattttctttagatttatatttacttaatataataccattccaaatttacttgtatttgctttatttgattttgaaagtttcatgcagatttgtttttatcctgaaatatcaaattgtctttcattttgtttcctgcactaaatttgcctttatcttatcctcagttttttaccccctcaaagttttatattgtctcagattttttccccttggaaatgtccttcatggagctctctatattgttccttcttcattcagaatgtgtggcctctttaatcttgctgtgcagctgtcattctccaaatcccctcaatttattttttggatgagagtcttattttatttgactcaatataattttgcttatgtattattgttttaacttttatggagtctatcagattgtatattaataatgtgagatattagagattggtttatcttatacccatgactgctttctaattcctctcatttagatcatgggacatgaggctgcccttatttctgaaatagtgtacaggaaaacaccagggaacaagtatccagaatcatgactgctaggttaaaaaggcatcatccaagtatggacagagaattcactaatgaagtccaaataggaagaacaagagaatatgttgggagaggaaaaggaatgaggcatgatgtaaagggtggtaaaccttgttttctaatccttgtctggattagggtagaatagaggcacaacagtgtctgcctacatttcctaaggcatccttcaatagagggagtagtcatcttgtttatcctaactggaactcttgtttttggttgacttcctaagatgtcagtaagggatgatatggtattatgagaacttacagatagcctcatataggattctacagatcctacagctaacccatgtagcctcatatagactctatgcaaaaattgttaaagtttaagataatatacataactagaataatatataatgctcacaaattagatgatttcataaatcatggttgtcaactctttgcaatttcatcaataaagttatagtgtttccagtgaaaagccaagcatgatttttagtgaatattaataagctcatgctaaacatctctatgccaatcaaaggcataagaaagtcaagaaaatcttgaaggcaatattttatctgcttttatgcatgtatggcacattttataggtttaaaaaattaaaataaacaaataaatagaaccaattatataaccagaaagaagtttcagagactaaaggtatcataagcaaaacagaaaatacatttgaagcctaaaaagtaagcaatggaaatatgtattatgccaaaaagaaaaagtagaaagacaacaaaagtatgaaataaaaaacaggagaaaaagaaaactaatttaggaagtacaactagtagaaataagaacaagaaagtgaaagcaaagaaatgggaaagaagaactgatcagaggggaaaaaagaaaaactagaaaatattttcaaagtttaccaggacatgtttcaaaattgaactttcttgactaactcaattctttctttacttattctgcttctaaaccttcctagaatcctccttctattggaaatgaaggaagcagcctgggataatagactcttcactttgttccttcctagtcacaggttatgtgtgtgtgtttgtgtgcatctgatgaaataatatatacagagtaaatatgtatgaaaattaggaaaaggccagtatttatttattagcttcttttacctttactatcatttttaatatctgttctttagtcagtttaaggaaatatcaagtagaggctcattatactccaaaatgcaaatatgtttctgagactttaaacaccacattgtctaacttcataatgctagaattctgttcctttatactcataccaaaattttcttttttcagggattattttgttaatacattctgccttctttcctcacatctgtcaacaagcaatgactgcctctttatcttccaacttttttcttttctcaaattaccaatgtcttttttacagtcaagtttatttttatagattttattttatttatctaatttgttttattagactgtgctgctgaattttaccttctatggcatttttttcagtgaaaatccactttcttgattttgcttgacttgctgacctttcttttcctttccctctgtcccttcctccctctctccctccctccctcctttccttccttccttctctcctcctccttcttctcttctcttttctcgctccttccttccttccttccttccttccttccttccttccttccttccttccttccttccttctcccttcccttcccttcccttcccttcccttcccttcccttccctttctcttcttctttctttttcagacaggacctcactctgtcacccaggctgagtgtgatttcagctcactgcagccttgacttccaggctcaagagatcctcctgcctcagccttccaagtagctgggactacaggtgcctgccaccatgcctggctaatttttgtattttttgtagagatggggttttgccacgtggcccattctggtcttgaactcctgggctcaagcagtctgcctaactcaagattcctaaagtgctgggactacaggtgtgagccactgcacctggcctgaccattcattctgtatcttctatgttgttgttgttttttaatttgaggagtatactttttcttttattttttcgttaaatagttccttagaatattttcagtcttacataatcttcctatacattctcatttgttttcttgatgtaagatgatttctaggtttttggttttccctatgaccagctcacatatgtccctgagacagtttctctactaaagcatttatttatttattcaagaaatgtgtgagtgcaaattatgtgctaaacattttagcaacacattctttcttctgctgtccttaacctgcactccatttcactggaatggccacattcctattatcattcagtactcactagttcacattagaaattttatattcgcaaacagggctgagtgcggtggctcatgcctgtaatcccaacactttgggaggctgaggcaggcagatcacgaggtcaggagatggaggccattctggccaacatggtgaaaccctgtctctactaaaatacaaaaaatcagctgagcgtggtggcacacacctgtagtcccaactactggggaggctgagagaggggaatcacttgaacctgggaggcggaggttgcagtgagtggagatcgtgccagtgcactccagcctggcaacagagcaagactctgtctcaggaaaaaaaaaaaaaaggaattttatattagcaaacagcacactgaagtcacaaatttttatctatccatatattttacttccttcttctagacatcaagaaaagtaattatttttttttaaaatgtcattcccagatgactctaatcagatctacctctgtgcactgttgaaacagaatccagagtcctaatctggaccatggaaactgagttgctaggacggacttacagaatctgcattagtagcaaatgttctaggtgattcacattcacgttacattttaagaaccactgctgtatgttgttttcttttcttgttataaatgatatcgtcatatatatttatacaaaaatgtacatatgcatatatgcatatgtatgtaatgttccatacaaataattatatcattgcaatagatgcctgagcaggaaatgatagttaaaaagaaaaccattttaatatatcttccactattccaatcgcttgcattctttctccaatttaattctataatatagtttttctagttgtatatctatcctcttttcagtccttttcattggtttccttcctaccattcatttatatgctggtattccccagggagaggtccttctttggtccttgtcttttcttctacacttaaagttttgcagaggtcacttaggtatttctcaagaaccatgcttagtctgcatctcccactttgtgttcatttaatgaattaaaaggtcaacataaaatatatgtagggctgggcacggtggctcatgcctgtaatcccagcactttgggaggccgaggcaagtggatcatgaggtcaggagttcgagaccagcctgaccaacatgttgaaaccccgtctctactgaaaatataaaaattagccgagtgtggtggcatgtgcctgtaatcccagctactagggaggctgaggcaggagaatcacttgaatctgggaggcagaggttgtagtgagccaagatcatgccactgcactccagcctgggtgacagagcgagactccatctcaaaaaaaaaaaattatatgtagagttttctaatgctaaaatttttcaatggtcaatgtttttccctttccctgtgtaatttactcattaaccgttccttcctaatatggtagccttgttattgcctccctatcatctagaaagcaagttaagacaagtagattatgattttatgggaaaccaaagtcttgagaaacaaaacaaaacccactctttattctttactctgaggttaagagaaaaaaaaaaagctgcattagttagctattgctacaaaatgctgcatgacaaaagagtcataaaactttcagtggcttattgatattttatttttatacttaaaaggctgtaataatttagctgatctaggctaggcttttctgaatgagttaaatggcaggcttctgatttggcttcaggtctgaggtgcaggtggaaggagcagcagagatattggaaaatctttttttttggtggcagatcccaggtgcacaagagaacaagcccaaccatgcaagcaattacattatgttcattcgcatttccttagtcaaagcggtttcagggcaagcccaaccttagtgggatggggaaatataccccacccacagtgggaggctttgtaaaattacatagcacagggtgtggaggtataatcctagtactaggcactgagtaattgcgacaataatccaatctacatcagagggacagtatatgaatctgaggattcttggtatacataattttttgtttgttttgccattatcagaaactttctcagatgatttttttagagggtttcacttacttaattaaaaaggttactactcatttacttgtgttttatcattagttcttttactgtagaagtggcagaagacagagaagaaagggcctcagtctcttgcctgagtctgagacctgtgtttcaaattgtccgataagtaatctacagacagtttttcctcaacaggcacccataattttattaattctttgtttatcttaagcctgtggctccttaatttctcatcatcaaatctccccaggttatcttcaagtttttcttctttctcatccttatacccaatctgtgaacaaatcctgtcagtttcgatggagtattcctttcaagtcccctcagtcaatttttatttcattaagtgttttcatttttaaccaggagttttacttcaaaaacctctggatccagaggcatcttataaaaaaagaaacctgagagtgtcccctgtttaaagggctcactcaactgctggagcccgggctatcttctctttcccattcaccactcaaactacatggaatactgacgtcaaaactctcactttttagatgattctcttactatctgaatatcacctacattgccttctccactcagcaaagcctgattcatcttccagagcaaagtagggtgtaatctttgctcttaagcctttcaggattctcttacgaagtcagtggccttctcctggcattctcactgcattctgcacaactacccattcaagaattgtttcatggattctttacatttgattataaaagcattaaaagatcctcataaaaatcagaggacatataaagtgtaaagaagaaaatataatcactgttcttggcttaagagaatacagttaacattttggtactatatttttatggcaggattacctcatttaacaatatagcatagcatttttccaattgtagtctattataaaaattaattttgctgtttctctccccccacagattgttcattcctttaaggatcatcatttttcattttacaccttatttccagtgcttggtacaatccttggcaaataggacacatttaattaacagttgtgtgaatgttaaatgaaatgggaatattttattaagtccgaaataattcagtgaacaaagaagcataactataagccagtgacagactacaaaataggtagtattttactaaagtctggatatcttgttatgttaaatattatttttgaaagcctgacattgtgtcaaggcaatagttatgctataattctgtgttaatcctgttttctatttttttgtcctcaggaaattatttgctataagaaatagagtcacatgagactttaaatattagtcaaataatgctgtagttttagcactggtaagagatacaaggggttaagtcactctagtctttcttcttcttcttttaaagacatgtaacttctttgtctgatctccttatggtccttgtcacaactgtatggcttttaatcactcatacattcagtgagttactgcactgctggaaccttaataacgttctagtttgtttggatgatcttcctgataaagtcctgacaatctctcagtataatggaaagacaatcaaaataaaaaatgctttaagagttcaggtagtggagcatactattatttttcacacagtgcaaggatattaaaatactgactttcattcatttgattgagttggtgatgaaatccaagaaaaattgaaaatttgaattattctactgccagtagggactgtatatcatgaacagaaaagcaggcatatgtaactgactcttgtagcataatctgaaaagtgtcagcttgccctccttttatatgaatttctgcagtatatctaagcaattaattcattatatagctctcatatttgcaatcaccacctggaattttataaaaatataaaatgtcatcttcaatatacatagtttgaatagttaaaatgacgtcttacattgatagagtgtttcagttttttcaagatgctttctgttaaagtatctcatttgactcaacagccctctgaaagtaagtagtggaactctgataattctccagcctgttccataccctttgcctccttccttcttattaatttccaatttatctttctttcttttaaaggaggcagtttggtgtgatggaaagagcatagaatatgaattcagatatttagctctatccttgtcttgaattactttgacattggagggatcattttcagttctctgaaccttggttttctaattggcaaaataataatgatgctaaagtgtactcccaatgttgtgaggattaattaaggtgaaattggggaaaccttaaaagagcaaatgtaacattcatgttagcttcttttaagggcagcttgggatgatggaaagagaacagatctttgcttcatggcttcttacttatggtacttgagcaagtaatctaccctttctgagcttcatttttctaagtgtgaaatgggtataacaatacctgtcttgtgaagctgctgaaagataaggtgacatatatgctgattctagcatagttcctaactcagagtcatatatcctattgaaagtgtttccctttctttcatccttcctccctacctcttaccactcctctttcccacctcctgtctttccactttactcttcatcctcctatctcaactttgtgtgacagaaaaagataaagaacgtgattggagaatctcaagatttaataatttagaaagtatttagcttagaaattcttttttctaaagaaaattgtaattttcagttgaggcaggagatggggattcaagttctccctccttttgagaaaagaccccttcctggcccactttgaaatctccattgaatcctgtaaactttgtgcagtagaatttggaaaaccactggtgtagccgaaccctctcaacttgcagatggaaaaactgaatttgagggaagttgagatacttgcctaagctcgtgaggctgggaagtggtgagctaagactagaactcagtcgttctttgccttaccctattcccttagtaagtaaagatacagagtgcaaatatgtataatcagattcatctcttgaaagatgttacagtctatttgtgtagatggaactcacattaaaagatgaggaaagtaaagtagtatgatataacaatgaaatgggtgaaataggtaaatccattaagaagagacgggcatggatgatcactgttttggggggctggacactgcaaactttatgagggcaggaatttctttgctgtgctcattattattttattcccagtgcgtagagaagtgcctggtttcctatagggaattaatactttttaaaaattaaataaatgaatggctaaatgagatgtaaatgaaccagtcctagaaaaagggcaagggtttagaaaagttagatcagagtgtttaaacaatgggctggtcttcattgttgggcaatgaaatatgttgagtgagtcacgatttacatataaaagtgtcggccgggagcagtggctcaagcctgtaatcccagcactttgggaggccgaggcgggtggatcacaaggtcaggagattgagaccatcctggctaacatggtgaaactccgtctctactaaaaatacaaaaaattagccaggcgtggttgtgggtgcctgtagtcccagctactcgggaggctgaggcaggagaatggcatgaacccaggaggtgagccgagatcgccccactgcactccagcctgggcgacagagcaagactccgtctcaaaaaaaaaaaaagtgtcattatgtcatggaaattgtttagatttatatgtgatacatacataaaatatatttggaccaatatgcttgtatgtacacttggtcacaagttaaaatgtgtgtctcactgtaagtcatgattaaaaatgtttgaaaaatatggttttagacaaaggaaatactaaagtttgaggcaggcatgtgaatgttttgtgggaaaatagtgagtttaacagttttgctaaatctgaggtgaagagaatagtgaaatcaagtctatccaggggaagaagaatccatttggctctttagctattaaagaattacagggactccacttcacctcctgactgtctccatcatccacaataagatttaacaaagctacatgttaggaagattagacagcttaaactttcaggagtgattcactcggattggaactggggggagtagacagagaacgatgcaaaagaggcagcacagggtaggaaagttatggctttaactggtgacacctggtaaagaaaaccagtttcttgggcacggtttgggtagatgaggttaaaaaaaaaaagtgaatgtgtgatgacaaaatggagaccaaattgtgaacaatttcacagaagggctgtctgagaaaaaaacaaacggaaacaaaaaacaaaacaaagaaagcattaagagaacaaaaagtaggagttaggagaaggttaggatggaggtgaaaatctttgtggtcaactagggatagtcaatagagatctctagacattgatgagaaattaaagaaggccagaaggtctttaaaaagattactttgaaagaaagagattccttctcccctgaaatctagctattaagaccagaggggatgggagggatactggatatagataacaaaacttaaacagttaataaatgcttctttctttaatttgaacactgactagaacagcagttttaatcaacaatgtggcattagcctactacttttgtgttagtaacaagagacacttttaagtgtgtaaaaacatttactttgctaggtaagaagcatactctttatatgccctaaatttgtttaatatactaccattacttgagaaattgtataactttgaccactctccatattatggctaaattaggaagttagaaggaagattgagtattgtatgaaggttttagatttcatgtccttaaaactacttaaaataagttcaatattgatgaaaaaagttgagaaagttagaaatctaattacaaatgtctgaaatatgtccacataagttgagcttttccttttggttggagtttgtctgaattcagaggaaattcagaggtcaagaatgatgaataataataattattattttttttggagatggaattattattttttaatacaaataataaatattattttttgtcgctctgttgcccaggctggagtgcagtggcgcgatcttggctcactgcaacctccgcctcccagattcacgccattctcctgccttagcctccggagtagctggtattacaggtgcctgccaccacgcccaactaatttttgtatttttagtagatacgaggtgtcaccgtgttggccaggatggtcttgatctcttgacctcatgatctgcctgcctggacctcccaaagtgctgggattacaggtgtgagccactgtgcctggcctattatttattaattaattaatttattttttgagacggagtcttgctctgtcttccaggctggagtgcagtggtgtgatctcggctcagtgccaacctctgcctcccgggttcaagcgattctcctgcctcagcctcccgagtagctgagactactggtacatgccaacacgcccagctaatttttgtatttttagtagacacaagctttcaccatgttggccaggatggtctcaatctcttgacctcgtgatctgcccgcctgggcctcccaaagtgttgggatcacaggcgtgagccactgtgcctggccaaataattattttttaaaaaaaccatggcttaagttatttatttttaaaaggaagccaaatagtacccctctgttgtttattaaaggaaatatatgacattatagatgtcctgtgagcacatgtgtatatgagtctatataattaagagaaagatagaacatgagcctatgcatgtttatgtgtgtgcgtgtatttatatttatgtatgtgtgtgtttgtgtgtgtgtaatgaaactgtctctaggcaaggccaggtacaaaggtccatcatttaagtctcagagctaaataaacatgtgaggttataattattttattgagcttttttattttatgacccactaatggcttatggatcagttatattgataagcactgaaaacatacagcttcagagtttttttattttttcatttattgtttttattttaaagtgccaagaagaaaatgcccagttcccagccttatttttcatttataataaaccatagaagtacaatttatattatagggtagaaactaaagtgtatgtagggtgtatataactggcaatttgtatgcgacaataacgtactttcaatttctgatgaaaattgttgaacttcatttttgaatttaaaattaaatttatttttaaaattttttttattatgaatttggggcgtacacatgcaggtttgttacatggacatactgtgtaatggtgagatttgggcttctagtgtacccatcattcaaatagtgcatattgcacccaaaagaccatttttcaacactcacctccctcctgttctccaatttttttggagtctcctgtgtctattgtttccatctttacatccatgtccattgtttatctcccacttaaaagttagaacatgtggtatttgattttctgtttctaagttatttcacttggcattccagttccatacatacagctgcaaaatacatgattttattctttctttattgctgtgtagtattccatggcatatatataccacattttctttacccaatcattcattgatgaatacttgggttgattccatgactttgctattgtgaacagtgctgcaataaacataagagtgcaccaccaatagggtataagcattcccttttctccacacccttgacaaaattgttgaaattctgcatttgagtgtatgtcttgaaatcaactattcaatatcaggttaatgtttctttttgcactttttattatggcaaaattaaccccgttatgtcatttagcatttgtgagaagataacgtaatacaaacatagtttttaaaatttgttgttgttttgtttttacatgtactgtagattatgtatgccatattttatcaagagttgagatgctagaaattcctgtctgtgtaatttcctgtgggaactacctgtagctttctgcccaaagaaagaggggcggggcagggctatgcaggccagtttaatctttccaaatttgccagccagataaattcctttacctgctctggggcaggtgaatgaatgcatgcagtgaggtcaggagtcagctccagctgtatagaaggaaacatcaggagtgaggagtgtctcctcccctcccagtgttaacatttctaatattcatgggtagattcaattgaaaactaagtataaacattttgtttaatgtagtgcttgattatctgtcttatctattttcaagtaaaactaaaaactgagtatttagctttaaaattatttagcttctctcaaactctcagttttatcaacatcttgtcaattttaattgataacaccttcagcagagtttgtaggaatgaaatagaagcatttcccagttttgcttcaagagtctgaaatattttggttttttaagattatattgccattacaaagaaaaccatttgacttgatatatgtatatgttccccatggtcagagcctaccattaaattttctaaagattcttaggttaatttttttaactgtgtactttcagtgctaaaatatttattagaatcacactatggggaatgagaaatgttagactttatcaatatcgttgtctattggatcctctacatttacagtcaaattcttcaagtctcatcatatgtacagaaattgaagaacagttaatttctaggtgactaaatttggaaacacatgtaaagagagcagaagggcaatggaaatttacgcaagagagaactacctattttctgaatttgttaatatttaaaataggacccctacccaaactaaatgaaactaaaaattcagttcttgtttttctgctagaccttgcatttctttgtattactatttgcaccattaaaaatatatatataaatatatattttaaaaagttctctgccgggcgtggtggctcacacctgtaaacccagcactttgggaggccgaagtgggcagatcacctgaggttgggagtttaagaccagtctgaccgatatggagaaaccccgtctctactaaaaatacaaaattagtcggatgtggtggcacatgcctgtaatcccagctacttggaaggctgaggcaggagaatcgcttgaacccaggagggggaggctgcagtgagccgagatcgtgctattgcactccagcttgggcaacaagagcgaaactccgttcaaaaaaagaaaaaagaaaaaaaattatgatgcattagcttacataaatatacattgaaatttaggccgggtgtggtggctcacgcctgtaatcccaccacgttgggaggccgaggcaggcggatcgcctgagctcaggagatcgagacaagcctgggcaacatggcggaaccccgtatctacaaaaaattgaaaaaattaaccagggcgtggtggcgggtgcctgtgatcccagctccttggtaggttgaggtgggaggatcgcttgagcccaggaggcccaggctgcagtgagttgagatcccaccactgcactccagcctgagtgacaaatggaatttaaatagtattagggacaaaaggattaatgaacacggtttaaaggaattctgcatattagaattctggaatacttccgcaggcattctaaagtcctaaaacctgttgttttacggattctaaaattcagttttttgtacagcggattttcaaacaattttttttcttttactgaggacgttgaaattcatagcacaggatcttgagtccaccctgaaaactaaagaaagtggcttgttagactcttcagtcccaaaatataatgtgaaatgagaatgcatgttgatatcagataaatttaggctttgaatcttggctttgtcaagcggtatgtattcttgctcaagctagtgtacctttttgagacttagtttgctcatgtataaagctggagatagctacgcatcttttctttttcttttttcttttttgagatggagtttagctcttgttgcccagactggagtgcaatcgcgcgatctgatctttgctcaccacgacttccgcctcccgagttcaagcgattctcctgcctcagcctcccaagcagctgggattgcaggcacgtgccaccacgcctggctaatttgtatttttagtagagacggggtttctccatgttggtcaggctggtctcgaactcccgacctcaggtgatctgcccgcctcggcctcccgaagtgatagaattacatgcatggccaccccgctcggccggcaacgcataattttaaagggatatgaaagggcttgaaaaatatctagcacagaattggcccttgttatttgttaagcacagtattatttccaagggaactctcccaaatcatccctgaccaaactactacccttattaagagatagattggcctcttagattatatatcccttagctttgctcatcaatagaggcaaaggattcatttatctaaaggaataaaaaacaattgcccttgaagttagtggattcgtgcacctaaaaaatggcctgcatatggtaccaatcaaatcttttatttcttgcatattttgcagataatacgattttcaaatacaggttgtatggaatcaagtgaatcatctttaggagaagactgatttttagtaacctaaaatttttagtaatcaaatctggcagagcccagatttgaactgaggagactgtctttagagccatacacttattcaggacagtaaatattcagagataaaaccagtgtagaaattaatatcagggctatatcattaacaagattctatcacttcatttgcatttttttttttttttggtgtatgtgtctcttatataaagaaatagcgatgctgtgaatgcctacatatttgttgaacaaacattttttaaaattagaaactggataacaagagagaataagaaaaatgttctgcatttgttaaactaccatggaggtgaaggaagattttacaagctgaaaaatatgaaaaaaaaagaacatttctttatcttctgtagtattgataaataacatatttccagaagattatccatcacatcaatgttttcaagtttatttgtatcaatttgaggaaagtagtctatcatgacacttttaattgattaggatataccatattaccaaaaatagcaaaaacatatcacaaaggtttatgatttatataacaggaaaaacaaccttaactttttttttttgatgttatagaaaaaagtgttattttttggaaaaattctcccatacaatctgagaacaatataattcttattaaatgtatgcttaatagcctattagataatttgcttatctatgtgctatacctggtaacttttggtttattaatgtaaattttaaaaagttcctcaagaattaataataacacaaaagtttaataagattaactggaaagtacataatatctaaggtaaaattaaatcaaactttgggaaaaatcatttccccttctttgagcagcgcacattttaattgtatacgtgcatagccatggcagagcagcacatattgagtgcccaaagtgtcaaagctggcagcccaggctgaatcctgtagcatggctgcactctgataagctactacaggtcttctctctgatacttagtttgaactttaaaaataatttttatcagtgaaaccaagagtgaatgataaagataatagctaaagtaaaacaaaattcaggcggaggtgaagtaagtccaactttattaattttttgtattgaagtatggtactgaaataatattttaccatattttccatgaaccttgccagaaaatatatctgggataattaagtgttatacatattactacaaaggaagtaaggactcttcattttcaatcctaatgaccttgaacaagtaacttcgtttctctggatctcatttctttttctttttctttttttttttttttttttgagacagaatctcacccaggctggaatgcagtggcgtgatctcggctcactgcaacctctgcctcctgggttcaagtgattctcttgcctcagcctcccgagtaaccgggactacatgcgtcagccaccacactcggctaatttttgtattttttattttagcggagacggagtttcgccatgttgggcaggctggactcgaactcctggcctcaggtgatccacctgcctcggtatcccaaggtgctaggattacaggcgtgagccactggtcccggccggatctcattttctcaccagaggatggaattagatcactggttttcaaacggtgctctgcagagtcctacagattagaaatgctttttagtctcccacacaattctgactttgtattttatccattagcttcatgcttggaatttatttagataattccataaagtaaaggtttgaaaagcccctggactatattacatctgaaatttctttacttttaacactttatgagccatttatgtttttcctaattcctatacttgagtcagacacaggagttaccatacaaattttgtgcttttccacttctggaactgccttatactccagacttttcatggaatatccatctgctcttcttactagtagaaattccatttatttttcaaggttcaactctggctatccctgagatgaattgaattatcagccaggaaaaaactttcgttccctggaattttgaaaacagtaagttagtattatttttgagcacttacctgttctttgttctgttagggttgctatgtacttgatgagtttctgtcattcctacaggagctgggcaaatctgataagcacgagtagggcgatgaatagaagataatggtgggaccccaaggcactttctaggatgtacacatttcatcaagagggggtgtcacagccttagtgagatttctgtactgtccacagggaaatttaagatcaacatggccaaattctatttcaataaaaattatgcatctaaattttcaatgaaatttttgacatctgaaaactcatttataaaaataaaaatgcaaaatgcccaaacaaaaaaaaatgtgtaatggccacttgtatacacttgtatacacctctggactctggactgcataccctgtgcctgtcttcatcctctaacataacataatctacttgcacctttgttcagggaaattttgtgaattttgttggaaatgttcgatagcctttgtgtataagcttgaataaaatcatgatattgaagtttttaaaaatctagtgcaaacaactgtcaagcgcaatatcacaatatcctcgagaaaatcaagttgtgaagtggatcatcctcaaatttaaaatcttttggtctcaccctcagaatatcccctacttgaggctttgcagtgtaaatgccttcctgaataaaaatgagattaaggaatatttcacagttccttaagcagcagaaagattagctagttgcctagaaaaaattaaaaatctcatctggaaatttgggaggattttaatgggacctccttgtattgatcttgaaagatatagtttgtattaaaagcctctcttctcctctcccctcccctcccctcccttctgctccatttttagaaggagtctctctctgttacccaggctggaagtgcagtggcacaatctttgctcactgcaacctccgcctcccaggttcaagcgactctcctgcctcagcctcccgagtagctgggactacaggcttgcaccaccatgctcagctaatttttgtatctttttatagagatggggtttcaccatgttgcccaggctggtcttgaactcctgacctcaggtgacctgcctgccttggcctcccaaagtgctgggattacaggtgtgagccaccgccccccggctggtttttgttttgttttgttttggatactttcctgatcgccttttgatgtttgtcactagaacactgacaagtttatattcttttaaataccacttgctggtcgtcatgcttgctttttctttattaagaatatgtttgaattttaacctgtaaacacaaaatttgacacagtcatatcttgattctgtatctaacagcagtagtgtttataacatatttacaccattgtttcattattgttggctgaagtaattcctagttaacttttcattttctggttaaaattgtaatctaattccgtgttctgtttatcactaaataacagagtaatcagtagtgactgaatattaggagggacaattgaacacttttaaactcaatgacatgtgaactgaacatgcgcaggtatcataaaacaaagtttgaaatgatttgtttataacaaaacaatagctctttaatgaggaaatggacaacagcatgttatgttttgctaaaataaatataaaatggattatatttctaaaaatgatgaatgttgctatattaaaatatttattcatttatttcaaataagtcacttaattttttttttaaattttatcttaataaattagtcaagggatggttactttctcttttcaatgcaaatgtaattccttaagtggttttcatggcccagggcatgactgcatttctctgcatcttttctctttaacagggctattaacattaagcaagcaaaagtgttctcttgttaaaaaggaacagtccacccattccacccagagaagttccctctggtgctcggcccctccctgcactcaggtctgcagtgaggccatttcttttctcagcttttgttacactgccccctgcatctcaccaagtggactcgcagtctaaattgttaaggtttctcatattttttcctccctaaaacgtaaacataccattggtgcaactcttccttgaagcttaatgtcgtgtatttaatgctggacttaggtaaatgaaaggtccgctctcttaaaactgagagaaattattcatttaaataggatgtatataatactttaaaaactgtgtatctaatatctcttaaaatttattataataacacttattaaggattagacaaggtgataccttagcaagtgttattagttacagtttcttagatatattatctctgtattgatatgtctcgatcaataataaacagcactgatataactgaccttttagtacagtttgctatacacatggacactttcacataaaatacttcatgaattatcacaactttattattagtagtattacagattcaaaagtaaagttaaggaatattcaagttagggaagccaagtagatggctgcttttcagaacgtaaatttttattgttttaatgaaagaaaatatggcaaaattggcaatatattttccttttgacccaacgtgtcattaagaagaattctaagtaaattagaatgtttagctcagcatttctttaaatagaaattgttagaaatgaatcacatgactaaataggagaatggctaagtatagtgtggtacatcttcatgatgagcaataaacagtcattacgaatcatgttttcagtaaaatggaaaatggaaaatggaaaaaagctctctggttaataataattgaaaagagtgatatttagaaatgtatagtccttctgattgcaattgtggaaacaacctttgagttctgagccagagtactccagtgcacaaggcttctgcccatctcaagggcctccctggaattctcctggccatcctctttgcctggctacttcttcaggttccagcttaagtgtttctttctcaggaaagcctttgctgatctgcaggaccacttcagccacattatgttccccagttacatgttctcacaaaactctaattttccttcatggtatatattatgattataattaatcaccttgtggtatctttcaaatgtctgtcctccccaatagactatcagcttcactgaagcagtaactgtgtccttgtttactcaatgcctgccccagtgactgggacatagaatgagctcagtaaacatttgttgaggaaatgaacaaatgagtgaattgcaaggcactctctgagcacttttgacataatttcattgagactccaccaaaaacttatgaagtagaaaccatatttattacattttatggataaggaaactaaattgtaaaggaagaaaattggccagagttatacagtaggcggacagctccaatgtaaacctgacgtctctgaatgttgtgcacaagctcttagccgccaattgtaagtggttgtactgaatgtaactaagataactatatttaaatggtcaactttgtaggtcaaatatgcagaaatattacaaatctttatattaatttgttaataaatttataaacatgttaaattctgaagaaaatatataaaaatggaaatggtggtagaattgcactggttcttatttttttcacacaattctacatttcacaaattccctataccaagtacttatcattttctataaaaaggaagaaaaccattaaagcatgttggagctaggtttcaagtgtgaatattttgacatcaaattccaaagagtttccactcatcaaaagagaaaagttgatcactatcttgtgaattggcacacaatttgcaattaatttttctgaacaatttaacccaaaatcaatgtcataaatatattttaataatgttcaatgtaaaattctatgtaaaaaactgcagaataagtagctacattaagcctataccatagaaactgttaattaaagttttgagctgattgaatatatttctttctatgtatagcttttatgctttttgacattttcctatcactaatactgattagcaatcaaatgtataccatccagttttaaagatacctaatttatttatttcaaacttcaatatttaagataaacttgcctttcaaaaattaattttgttcctcaaactcaccaaagtaaaacataatttaaaatctatctctatagatttcctcttatactttttattttggtttttcttccagtgattgctgccttgaccgtccctgctcttgaagtaagtacaaatgagcaaggaccctgaaaaactctgggctcagattgccctagtttgttagataattttgatggtacaggggcatgtattttgagatacagcatttggtagtctttggagttaagtcatactgccgacacagattctactggctgttgcagacactagcttccctactaggtctgctctagctgccaaccatatccttcatccaaagcatcagatgtgagccctgaatgattatatagggcccagttttattcaggccttaatgccagacttacagatgaatgaatgactgaatgaattacagtccctgccttaactggattcttaatttctagctcttctttcttgaccatcacatttgacttcttgaccttaaccttacaaatgaaactagctgtccttcctaaggacattgtccctacgatcagccttggccaaataattttcccttaagttttctgcatgtcttaaagtataagtctccattgtccctcttatagagacctcaacatgctttctggttgaaccttagcagtaccttttgttatattttaataaccagatttgagtaacttgatttggccatctttctttttccttcattgatcatatacatgttgaatctgtgttatgtacaaagtagtaagctaagcccttaggaagaaaataagatacctataaacaatagtccttgcctaagagtatttcacactttagttaaattagtaataattactatagttcttttgtagaaaccaatttcagttcatctgtacctttgtagatggaagctgaccaaattcaggcaaaaaacaaacaaacaaaaattttctatgctgaaagtttatagttgattttggaatttcactttctaaaagtgaatttaaaaactgagtagccaggcatggtggctcatgcctgtaatcccagcgcttcgggaggttgagccgggaggatctcttgaccccaggagtttgagaccacccgggcaacagagcaagaccccatctctacaaaaaataaaaaattagctgggtgtggtggcatgtgcctgtggtctcagcaatgtgggaagctgaggcaggaggatcacttgagcctgggagatcgaggcggcagtgagccgccatgatcacaccacttgcactccagcatgtgcgacagagcgagaccctgtctaaaaaaaaatgataagaaaaaactaggtaatgttaaatcccacttacttcaacaatttaaaaattggcaaatattaaaaacccagttttttactcatttctgaataatataaatgctttaaaactcattttgacaacctttatattccactataacagtatttaccttgggacaggctccttttgccaacttgcagacaggtttttcttttacatgtaattgtatgtgtagatcagcgattcttatatttttttattttatttatttatttgtttttaagtttaacatgccgttggctctagaagctgccatgtttaagaatttcgggatagacacatatttgatcttttatatttgttatttggtttgtacacgtaatatcactgatctgctcaacaaatctttaatggcttccaatcattcatgtaaacaaatctgaaattttctgtctagctctctccaaaccctccataaaatagtcccactcttactatccaatcacacttctcacatatcctttcaaacactaattatttgcctttctttgacccaaaagtcttcttttcttttgcctaccaatcaaaatttatctatcctttaaagcccagcttagacccagtttcatgatcactccagttctcaattatgaattttcctctgaatttcaggactaactagaattagaataatttcttttctcacttgttcatgctaattaagatgatcattatttccctccacaaagattgactccttgtattaggtcattctcacactgctataaggacatacctgaaactgggtaatttataaaagaaagagatttgactcacagttcctcaaggctggggaggcctcaggaaactcacaatcatggtggaaggggaagcaaacacggccttcttcacttggcagcagcaaggagaagtgccaagcaaaaggggaaaagccccttataaaaccatcagatctcttgagaactcactcactatcacgagaatagcatgagggtaaccatccctatgattcaattacctcccaccagatccctcccatgacatgtggggattatgaaaactacaattcaaaatgagatttgggtggggacacagacaaaccatatcactccttgagggtaggaaccatgctttatatttttctttatgtctttggactccagaaacaagggccacttattagggagtttagaaatcactgttgttaaatgtaatttgacaaaattggtcattggactttttttgttttgttttgttttactttgtttttgagatggagtctcactgtgttgcccagggtggagtgcggtggcgtgttcttggctcactgcaacctttgcctcccaggatcaagcaattcttctgcctcagcctcctgagttgccgggactacaggcgtgtgccaccatgcctggctattttttttttgtatttttagtagagacagggtttcatcatgttggccaggttggtcttgaacttctgacctcaagtgatctgcccacctcagcttcccaaagtgctgggattacaggcatgagccactatgcccggcctcattggacgttttggacaataagcttagaacaatacaatctttcttaggactttaaagcattagagactttagggattaatatagcaaattcttcattttacagatgagagaactgcgatttacacagggacagtatggatcagccattcttagtagcctttatctcagtatctttgatagcctttctcattctatttcctcaaatttaaaaaatgaatataaggagtgtgatgttttctgtctattaaaaagtatgaaaaggcactgtttcatcctcggtttggtcagaaaagcagaaaacacttcaggagtttgaagtaggagggatttaattccaggaacaaaatgctcacaaaactaatggaagacctggagaaatagaattcaggaaagaccactgttagcttttaggctcaccgctcactttggtgagtcaagaagctcccagcactgatcaaagaaaaggcctccaatatggaggtggctgaattccagaaaaataacccagaagccacaatagcatctcatatttgttggagccacgcatatattcacctgcagttactggaggaatggtaaaggtcctgcctttcttccaccttccaaattttacctgagtgcttctaaatggcagaatctgtgctgtgaaggaaacttatttttaaatgtattagcatcttagttctttatctcaatggtttgatgcctttcaatttaagggcaaatattcctacacatgtcaatatctcacaaattatttatctgctctaacactaaacagtaattgatgtttataataatggaattattaatgctggaagagaccagagataaactgaacctcatcttctcatttaaaaaactgaagtcacatagcaatggtgttgaagagccaacctttttgacctacctccatggctcagatggagtgttttcctgttatacttgtatctgaatttgcctactgctttatagttacattcaattgaactctataactttctgatttaataaggatttaaactacctaattatttagtgctaagaccatggttgagttttataagacacttcaaaaaattgtacatggggtcatacacacaggtgcaaactaaaggggagtttagattgctcattgctcttccaaggtgaaatcaccattttatctgatgacttacaaatgaaaaatctggccaataaatctatttagtcagatttctcaacattgtgaatgatcctcctggtagccagatattatgtctatcatgacatgaccgcttatttcatgttgacttgttgttctgtgtggaacttcctgtggcactagagttttcttaagtataaaccattccaaaatcacattgttattatgggttgctttgtcctcaggctctgtaggactccttttgggctattggtctttcaacatgcagttaggggataaaagtaaatcatttaatctatgcagcatgtcactcaatagtatacttttggaaattgtttccacaggagcaccagcgaaagcagccagtctgagatattgacactacagaaaaaactgacagcttactccttgtattgattctactcttctctacaaatatagactccgttccctaccacagccttgtaagtggtgcccgctgaggctgctaaattgctttgtaaattatttattacttggacaccttgtaaagacctcttttcttcttgtctgacttgcttgtgctttcgtatatactaaaaggtctcaaagtgtacactgaccacaacctccttatgaaatcctttccttcctatcttttattgcaaatatgatcttccttgcccatattatgactatgccttttgtcattggtttttatttctgatctattgcttataaaatatcataaatgtttatatgcacgtttggagcctggcactgggcacttaattagcatattctcaaattagaaagtttgaagtatttaaagaacatttatttaatgatgggaaagagtttctattaataaaaactgtttatcagagcaaatgcacatctttatttgcacttatgtggtagagtcaatgttctgaaaaagatggcaagtgttttctctcttttcttgattatttcttcttacttaggttttattttgtgattttctgaagaatttttaaaatgttcataatgtagataatgaaaacaatattttttgtccagtaaacaaaacaatttgagcagattgcgattgttcacttttagctaactgaaaccatatactcacatataaaatactcaatagaaaacgtcttcgcttaataatttgcattttcctgtctccctctcttagcttcctatattagtcagctcagcactagtataaatttggtgatttaggtccagagttatttcagtgcctcttatagtttggaaatccaagaagctactcctctcatccatccctcaaaattcattagtttgtgtttggaaagtacaggattttcaatcttgtctctgccatttatgagttctatgactttaagcaagtaaattagccctcataaacatcaacttctactatgaaatgaagtagtaataataatagtaataacatctatcccaaggattattggaagaataaatgtggtatatttggagtgttagaacgggcatatattaggtatcagtgatgtttacaacatgttactgatacaaaatttttttacttgaagatttacttttatgataattatattttatacaataccaataaatacatgttgagaataaaaaatgtagtgagtaattatacactaaaatcatagtatcttataggcaatttttttaggtcatagaaatttgagaagcacaaaaacacacttctaaaatcactataattctttttcttttctttcctttttttttttaagacaggatctggctctgttgcccaggctggagtgtagtggtgcgatctccgctcactgcaacctctgcctcctggggattcaagcaattctcgtgcctcagcctcccaagtagcgggattacaggcacatgccaccacagccagctaatttttgtatttttagtaaagaaggagtttcttcatgttggccaggctggtctcaaatacctgacctcaggtgatccatccgtcttggcctcccaaagtgctaagattacaggcgtgagccaccgcgtcaggccagatcactgtaattctcattgaaatgggaaatgcaagtcgcttagaggactaaggattagaccatgaagacttataagcagaagagtccagctatgtctagacaggccactgtggttaagagatgggcacacaaagaacaatgcttgccccaaacaagtggttttagacagtgaggcccttagccataagcttgaaatctgtttcaataatatcctctccaggccaggtttactccagagctgtgctggttttcttgtagactgctttgtgccagcacatattgctatgacttcatttcattttttccttacatactgaaggtaatcgcttttaagatgagttttctacacctgttttcatactcaattcctggcttgaaatgcttgtttctttacattattccaatgtttcaaggcccagttcaaatgccaccgccccacactgatctagtcactcttactactacctacttgtttcctcctcttctaaatcctttcagttttgatagtatgcattaccctaagtagtgtctgagatcagatagagtgctctctggtttaataactgtttaatgtaaaactattcagctagaaacctgtaggagagggaagaatcttaatgaaagattaaaggagaagccaaaggctggttaaagcagagtattttcagataaaatgcacagtctaagcaccagatgggagcattattgtgacccccctatgtttgcacatttcacatatgtgtcccattctcaccaataatgatggccttcaccacaacttctttgtagattacataacacttgcacataatttatctcatttattcctcaaagcaattttatgagatgggtctctttatcctcattttgtagagaagaaccaaagcctagagggggttacaatgatttgtcctgagtcacactgaagtccattacttttattttctatccatcccagctgaccttacacagtggctcatcctaccctcacagaaaccactcaaggaaggccagaaagatatttctggctttgaattataagcaaggaggctgatttctcctgagaaaaagtgaaagaaaaacttctcatccaagcactctctgccttttccctttttggagcagggagagtgcagttctctgaacaataagattggtttgacacaaaaaacaagtggaagtctgcacatgactttgtgcaagaaatgcatgagggaacagagttggaatatgactgaaatatatatatatatatatacactcacacacataaatatgtatgtagtcatatacatatgaatcataaaatgcttaaatatgtgtaaaaatatgtattgaaaacatgtagatctaccttattttatatatatttagtaaaatttgggaagaagggaaaatctcatcattggagtggaccaaatttgtgttaaacaattttagaaaagacagcaaggtatatatctggagggaaaggaactattagactgaactgtactgagtagattgagtttcatgtcctgggaagaaatggaggctggttggacacatgcttccccatcctgaagagtgcttagaaaaaggcgtgctttctttctcacagaatgaatcattgaggcaaaagctataaaggtatatacagcaaaatagctttgccaaatgtttataccatggatatttccaacaaaagtgtaagagattgtccatttgactgcattcttatcaatacttggtattgtaattgaaaaataataaaatgctagttggaaaagttaaaaaaaattgtttataatgttaagtttagtatgaaaattttctatatatttgtttactaattgcatttctttttttaaaaaagtatatttttaaattttctgttttatctatttttacaatagtgttttaaaatcaacttatgtaagcttcatagtgttttttacctgtttaaacaatgtttgataagcatatataattcctactgatgatgatatataacaattagaaaacttttttgctgaacttgttaattttattaagcctgattatgttttaattgttattctttttcaaaaaaaatgtttaaaaatttgtcccaagcaattgggggtacattttctttaattttctctgttgttacattttccactgaaagcaaatttgcagacatatacatcaatgccaaataatagaatctaccctccatatattaatatttttccaatgtgatatctctgagcagcattgtattgctatttcaaatagtaatagtatatattaggaaagctgaatgattataaacttacagttcattcacaaaatttactaagttcatactttgtcgaaacaattgtagagaaatcaaagttgtctaaaacatcaaaccttcctgcaaagagaagacagttaatgagattataaacatgtattcaatacattcacaagcagcatgaaataaatgacaataaaattagacaaagtgttatttttacacagagtaaggaaaaaagctactgctctcccatacagcacacacacacacacacacacacacacacacacacacacacacacacaggttgacaatacacaaggagaccaagaaaaaatcatgtgatagatacgtgaaaatttaagtcatttttattgcctgaaataatgagatgaacattaataaggtcttttattacagttgcataaattgggctttaatttgtgaccattgagaattctgctccagactaaggattaaatttgtttttattgaacgtaataaataaagattacacattaaaatattatgaatcatgtgcatttagaaacaatcttatcaaggaccagtattgtggtttattagttcttgaaattatcgcctagattactgccttgaacataataagtggtcattatttttttttgaatgaatgaatggtggcaaaatgtagtatttgaaaggattaacttttagataatactagtaatagcatatgtagaaataaacatgcactaaaattatacattttatacaattataattatacaattatagaaaaatatatttatttaacaataaacatctctactttaaaaaggtaacaaaaacagtgtttatttaaattgactttgaattatgacctgctatctataagcaaggtgatgtttttggtgttaaggaaactatatagtttcatagtttggtctccatcaattagtaagtgtaagtgatgccagtagtacactggtatatcttatcaaataacaaaacactgaagacagaataagatgaatatgataggagagaaaaaatggcagagattttggaacacaatgacttttgcttattctatttatgcttttgcaactgattcacagactatgttcctaaaacttaaactagtatcctcctactcttctcattgtgtcatctttgaaatcaccaacaatggtatttcgtatcatgcagagtcatatagaaaactttaatacaggtgtaatatctctgaagtttccatgtttaatatccccatgtgatggcattcactattatcacattttctatagatgttaaggatgggaagttattattatattaaagaagactttggattactaacttgtaatgtttctgtaggcctcagaattcactgtgctgaggagctaacaggatcctgacatttaattgtctctgcctgagcattctgtcaactttggaacttgtatgaggcaagtgtgataacatacataaagacagaacacttctaattttttttttttttttttttaaatacagagtctcctctgtcacccaggctggagcgcagtggtgcgatcttggttcactgcagcctcaacctcccgagttcatgcaattcttgtgcctcagcatcccaagtagatgagcccacaggcccgtcccaccaggcctggctaatttttgtagttttagtagagacgaaatttcaccatgttggccagtctggtctcgaactcctggcctcaagtgatctgcccgccttggcacttttaattttgtataataaaatatttgatacaaacatacacactacatatgcagtataaagaataatactgaaataggtacaatatagcccttaccttaataaagaaatggaacaatatcaatatttctatattattttgtccctattattgatcaattatttattctctccctcttcaacaaagtctttaaattttgtgagctactgtattatagttatgagcaggtactactaatatctaataattgaatgacaaaatatctatgggaaaaaagtaatatcaaaactaatattttaaaatctgttacttctttaaaagtagtgtatatttaaatccaattttaatataagtaatatgcaaaaaatttgagagatccaggagatccagaaaattattctgcaagaagagtaaacaaaatttaccgtaaaatgtacttcttaaagataattggtttttaaaaaatactattctagtcacggttatcctttattctttttttcttgtcatgagcttttcctgatacctactggcagggttctagcagcttcctgaatatatcttaatataatatattttttttcaactcagtggatgttacattaacttcatggcactggaggtctttttgtttatttttcctgagtctgtcaaaccttaactgctcactcaaaagcttgacgttaccagtttttctcagggcattttcaaactcctagttattttaaacagccaccagaattctccatctcacaactttcagaggggatttactccaaaatcttggatttcttaatcttgcatctcttcttaccacttaatttattaaaaaaagaatctctctacaaagctcaagaacataactggttgtcatgaaggagctcctataatatttggtttttattccatgaaaattaataagactataaccagacaagtggagaaaaagacatagaaaacatagaagcatatatagaaattataacgaagcagcatcaaatacattattactatatatatatatatatggcattaaaatatgtaaagataggttgtgctatgtctctgatgactgtctaaagttttgtgactatgagaaatgcagtttttggaaaaatgaagagcagcagtgtctactagatttagaaacattatcttaacaacaaaatgcaaattttgttgcagaaaagatatttcctcagttccaatgccctatgattcagaaaaacctagttgagtaggggctacagccctttgcttgtttctcactagctttgatggggtatataaatgctgtgtagatgagaagggcttgaggactaagaaccaaacagggttgtgtattatctctgttttaaaacaaagtctgttttctctattggcagaaaaggtgggtgtttgtgttcgtgtttgtgtttttgggtcattaaaatacatttaattttgtcaggcagaggacaccacatctgattccttgtaaaaggaagtcataactgctggacacatagagaccaggagagggctaggtactgcagagaaattaaaagaggtataaagtacaatatataatacacctaataatgtattgaagaaaaggtaaaatggttttggctaggcacggtggctcacgcctgtaatcccaacactttgggaggccgaggcgggcagatcacgaggtcaggagttcgaggtcagtgtggccaacatggtgaaaccccgtctctactaaaaatacaaaaattagcagggtgtggtggcaggcgcctgtaatcccagctactcgggaggctgaggcaggagaattgcttgaacccaggaggcggaggttgcagtgagccaaaatcatgccaccgcactccagcctgggtgacaaagcaagactccatttccaccccctcaaaaaaaaaaaatagataaaatggtttcatgtagctgctgaagacgagcaaatcattataagattcctagaattttttttaattaaaagaacattcttatgctataatatggtaagtcagtttagaaactaaacttaaattgcatttaatattatcctgtctttgattttgttgtaaaatgtttcaaaaaatgtataaacactacacaaaattaattggaatatgattaatatagtatacatattaatagagaccctactgaaatttttaaaataaatttgaagtattcataccacaggcaaatgctaggacatttgggacacttagaatttttaagttccaccatagaatccctgtcggcacacaagacaaaaaaaagatatgcttaatgcaagagatacatatattcttatttcagcaacattatatataaatcaaatttctctaaataaataatatttttctaattatgtctcttcattttgaggtatattattcaaagcccatatccaatttttgggtcttctattaacttgtttgaagttaacaaggaacaaaaaagcaatgaaagtccactaggaacagtaaagtttcataacaaatttgataacttagatgaaatggacaaatttctaggaagacacaaagtatcaaatctgactcaagtaaaaatagcaactctgaataggcttataatatgtaagataattaaattagtgatcaaaaacattcccgcaaaaaaagtccaggattatatgacttcactggtgaattcgagcaagtatttaaagacaaattgtcacaaatcctttgaaaacacttccaaaaattgaaaagaaggaaacacaacttattatatgaggccaatattaccctgataacaaaaccagatgaagacatcaaaagaaaaaaaattgacagaccagcaatcttatgaatataagtgcaaaaaatcctcaacaaaatactgtactagcaagccaaatacaacaacagaaaaaaaggattatctatcataatcaagtgggctttatctcacaaatgaaagggtggttcaacattaaaaaatcaatgcacactaaaagaataaagaacaaaaaccacatgatcatctcagtagaaacagaaaaagcattttacaaaatacaacacacttttaagaaacaacacttaaaaagccagaaatacaagtgaactttagcaaccaaataaagtatatttatggcaaactcacatcaaacatcaaacaaatgctgaaatatttggagtcagggacaagataagaatgtctgtttttgctacttctatttagcattttactggaagttcaaaccagggcaactaagcaagaaaaagaaagaaaaggtgtccagattggaaatgaagaagtaaaactatgtcaatttgcagatgacatgatgttttatatagaaagccccaagaaatccctcagtagctattcaaactactaaatgggttcaacagggttataggatagatacaaggttaatatacaaaaattagtttaatttctatacattagcaaacaacagtcagaaggtgaaataagaaaataatttcattaacaatagcttaaaaataataaagtactaagaaacacatttaacaaaagagatacaagactgtacactaaaaactacaagcattattgagagaaatggaagaattccttaataattggaaagacatcccatgttcatggattgaaagatttaatatatatgtaagatggcaatactccacaaattgatttacatatttaacatagtcctaacaaaattccagttgtcttttttttgcagaccttgacaagctgataataaagttcagatgaaaattcaagagacctaaaatatgcaaaaaagaaaatttaacaacaacaaaagaacacagctgaatgacccacactttccaatttcaaaacttactagaaaggtacagtaattaaagctgtacagtactaacataagaatagatatatagattaatgaaatagaatttagagtccagtggggggaaaaactcatatattcatgataaattgattttgacaagggcaccaagacaattcaagtgagaaacaatagtctcttcaaaaaatggagataggacaactggaaatttacatgccaaaaaataatgttgaatgcctacgtgacataacatacaaaaattaactaaaagtgatcaatgacacaaatgcaactgctaaaactatcaaatccttaaaagaaaacatattcatgagcttgtattaggcaatggactattagatatcacactaaaagcacaaactacaaaagaaaaaataaattagacttcaccaaaattaaccattgtgcttcaaaagacattatcaagaaagtgaagagacaattcatcgaatgggagataatgtttacaaatcatatgtcagataagggtcttgtatccagaatatataaagaactcttacactgcagcaacaatacaatgaaaactcaatcaaaaatgggcaaaggatttgaatagatgttactttaaagacgatatataaacgaacaataagcacatgaaaaaatgtccaacatcgttagtcattaggaaaatgcaatttaaaacaatgagacaatgctttacatcccccacaatggctataatgaaaaaggcagaaagtaacgagtgttggtgaagatgtggagaaattgaaatctcatgtattactggttggaatgtaaaatggccaactgctctgggaaaatgtttagcagtttttcataaagacaaacatagagttaccatatgatctagcaatttctctctagaacatgtacccaagagcatttaaaatacatgttcatatgaaaaaatatgtaacaatgtctatagcattgttcataaaaactgaatagtggaaataatttgtatttccatcagctaacatatggataagaaaatgggttatattcatataatagaatatcattcagccataaaaaaatgaagtgttgatacctattacaacatggattagccttgaaaacattacactaagtgaaacaagacacacatgcacacaaaatattgtacaattcccttcagatgaaatgtccagaatgagaaaatttaatagagaaagaatattgattagtatttttcagaggcaaggggagggaggtcgggcatgactgttaatgtatattggttttttgaggactgatgaaaatgttttgaaattagagactggtaatgtttgtccaaccttttgaatacacttaaagctactaaattataaataaatataataaacatgtatctatatataaaatgtgtttatagtttatcatatataattatattagaatttatcctgggaaattgtaataaaaaagactaacaagggaagaataatgaatactaccagattttaaaacatattataaaactacaggaattttaaaagtttacagctggccaaggtggctcataccagtaatcccagcacattgggaggccaatgtggggggatcacttgagtccaggggtttgagaccagcctgggcaagatagggagatcgtatctctacaaaaaataaaaataaaaaaaataatccaggcatggtatgcacacctgtagtcccacctacttgggaggctgaggccagaggctcagcccaggagtctaaggctgcagtgagctatgattatgccactgcactccagcccagctgacatagtgagatcctgtctcagataacaaaatgtttggtaacatttggtacataatagacagatcgataagttgaaacagaatccaaatgtactccaaaacacacacatatagttttgttatttttttcacatgaaaaattattgttgaagagattttgttcagtaatagtgtgtagacatttggttcgcattccatcagagaaaaaaattacatcccttaccaacttcacatattatgccaaaatatatcccagataaaacaaattttttaaagaaatgttttttaaattgacaaattaaaatggtatatatttatggtatacaacattggtgttttgaaatacgtatctatcttggaatgactgaatcaagctaattaacatatgcattatctcacataattatctttttttcatgatgagaatacctaaagtattttttttttttttgagatggagtctctctttgttgcccaggctggagtgcagtggcgcaatctcggctcactgcaacctccgcctcccgggttcaagcgattctcctgccttagactcccgagtagctggtactacaggcgtgcaccaccacgcccagctaatttttgtatttttagtagagacgaggtttcaccctgttagccaggatggtcttcatctcctgaccttgtgatccacctgcctcggcctcccaaagtgttgggattacaggcgtgagccaccgcgcctggccctgaagtctatgttcttggtgatttgcaagtattattaactatggtcagcatttatacaatagatttctcaaatttaaaaacaaagttttaaacataaaataaagtatatataaaagttgtgtgaaagacagagaattgagagaacatgttttccctaatcctcatgaggataccctgtataaacacagtaaaacatagagataacaaataataaaatttgacttgatgaattttataaacctgcattacaaaaatagcagtttatagcatattttaggtaaatgttaattttaatatgtaaagagattttatcaagtgacaagaaaatagcaaacagcctaatgggcaaaggacaaaaacacgtaggtcaaaagaaaaagtaagcttttaaacatatactaaaacgcctcatcctgtacaaataattaaagaagcacaagggtaagcaacaatgtaatactactcttaccattcagtttttaaacatgtcttttaatatttggtatagaagaggttgtggaaaaacaggcattctattatgatatattgttggagtgtgtgtaattattataattgctttgaagtaatttgacctaaaaaatttgacctatacctttcgctcagaaattcttcctttagaaagacacccattgttagcaattacatttgtaggctattcatgatattgtctgtaatagcaaaagtctgaaattgtctgttagtaggggagtagtccaatatacgatgatatggatatattttcaaacaaaatatgcaaaacaaaatgcatattgtaacatatttgtactttgaaagtacacaaacacttatactcatgcagtttttacttgcatacactttttctggacagatacatagtatctacaaaattgtgagatattattaggaagggcagcagggggttctggaaggaaaaagagattacttttcatatagaaaacttcataggtaaatcattctcaaatattaaaaacaattttctgtggtaaaggaaagcactagttgagagagcagactttgacattagatagccctgtgtttgtgtttggttttgctgcttactaagccttgggcaattactaaatgctctaagcctcaatttcctctttgtaaaataaagagaaaaatggcgatcacctacagagctataagtattcaatgagttaaaacatgtaaagtaacacagagatgtcacagattgatcacttaattaatgccatattatttttattactaatagtaagagtgatagttcaagagagttgggtgtacagtgtctctggcttccagtgagagatgttgtcaagatattcttacaacagcttctggtctagatcagagctttttatccatagtgctgtgataagctaatgtgtcacaatcattgttgtttgtgttctgaataatttgttacttataatactttactgaagtttgaggtttgttgtatgttagagctgaatcagtgttgtacctataaatacccttactctcttgaattatgaaatgattttttgagtctgacaaagaggagtggagtccttatagtacttataggagtggagaacttacagagttctgaaaactgctaataactctgggtatgccagtgagaatgtgtcatgtatgagaaaatcacatggtcacaagctgtaatcttttgctgtggatgggaaccagtttaaagctagtaaagaggaagttccaggtaatctaaaggcctaggagtcattgtgggttatgtttagaatacatgagtctaagttgtctccataatcctaaaagctaataaaattctgggtgtattgggaggccgaggcaggtggatcatttgaggtcaggagttccagaccagcctggccaacatggtgaaaccctgtctctactaaaaacacaaaaattagccaggtgtggtggcatacatctgtggtcccagctactcaggaggctgaggcaggagaatcccttggaccaggaggcacaggttgcagtgagctgagattgtgccactgcactccaggctaggtgacagagtaagactttgtccaaagcacacagacacacacacacacacacacacacacacaaacacaccaaaaacaacaacaaaaaaaatctggatatgatcagggaagaaaacaaaacatatttttaccttttatattaacaagtgtttctccctttaaaatatcaaagatagttctggttactaaatctcaagaaagacatgctcttaaaactgggattactaggtcaaaagttacaagcattttaataactcttgatatatacatatatattatacacttacaaacatatatacacatatacatatactttttgggggagggcaatttacattgctgttagtgttgcacgagtgatattaattatctgcaacacataatgtcatttacaaaaagctcattttctaggcataatatattttgaggttaatgcactgtaattattatcaaatttggacattttccaatgttagttttctatttatatttccctttgtctaaattgcaaatttatattgtactgatgatgatttgtttattaaggtctttctattagatctttttattaggataatttcattacaaattaaaatgatctcttattacttatttgtaagtaaccctgggattttatacagtgaattgtgaattgtggaaactactgtgaatatctaatctgtttcactttataatgttgtacttttgaattatacctattatatttgatgggacaagagaggaaagatgagtgaatatttcttaattccactcattaatataggtgattatagaaacttctaccagaatctgggatatgctcaatttttaacactcatgagtatcactgagaaattttcttttcagagggttttatggataatttactagggtttcgagggaaggtctctgtttctccatgccaaccttttctgaaaatgttagttttcagtacaagtactgattttacccactaaatgttggtagttactgatttctaaactcaactcttctgctaacttgttggtggacctttgacaagtcacttaacttctttgtctcctcaaccacaaaatgaaatgttagtctgagatgtccttaagctccttgctagctgtgcttctttcctgattcatttgtactatccatttcttgcctctagatacacctttggaatatgcaaatgaatttggaattgtctgtattctaacctgagttggcttctctttctacatcattctttaacccttattccagcacaagacaaacagtacaaaggtctcaaaagtttgggaccttagatccagaatgttttgaaacaatattcactcactaaaatatgaacaaagttaaagcaaaatatttaacaacattgttttacctctcaatttttttgagtttcactgccttgtcgtttacaaacaaatataaacgtaccttatgatagagttattctgtaaactccgtaatgcaagatttccaaaaaaaaaaacataatacaagagttgcaaatatacatattcgggaattcttgacacttttgtcatctagtttaaaaatcatctgagaaagaatgtaatgaattcatttaactgtgagttacattttaaatattttgtagagacacaaactctgaataattaactctgttactactcaataatttaagtggaatgacccttgacagtctgtttgtaataactaacagtgcattttaattattttttttaaattagaaatgacatctctagagttcaagattcttgggagcaaaattgaacttttaaaattggttagtatagagggttatttttcttaatgaaaataaaactgatttgcattttaaaaatctgggtacactttttaaaatgattatgtcagtaatttaacattaggcatatattagagagaattataccttttctttctatctcttcataccaatcttctggtatgttagaaactaggtagtataaaagctaaataattgtaagcctgaaaaatcgaagatttagtgattttaagaatctgaaatttctgtcaaaaaatgtaaagctaattttataaaaataaagttcagtttataagatagcaagaataagacctatcataaaatttacaagcagatttagtaattattaaatactagatttaataagcaggaaacttatcttccacgttcactggctgtttatcttatacttgaactcttccctcattttatccttttgaataatactgtactaaagtgaatctctgattaatatttaaatgtacatggggagaaatgggtaacctaatcagagaaaataattaacaaaccacctcattctcatatccctgaattcttacaaggagacatatattttgattactacaatgtaattccctttgacctcctttctaattcaaagcttattagatttcaggattgaactggctcactaacatttaattacagttcttaaatattttctgaatgtgttctaatgtcctggattttcctaaattccacttttcttctcccttagagtagcaaaagttaactggtaaggattattttccgcttccagacaattttgtgatagagtgcaaagacaaattcttgtgggctaggtaaagtgcttttgtggcagatcatcaacaacaacaacaacaacaacaacaacatcagcaaaagctttttatgcagtggctgaaagacgagataggtctttatgtgttaatgtagaatgatatttatgttttgatggttgagcattgcaattttatttgggcctaaaaatgttataggtttacgaaaagaacatatataatagatgatagatagatagacagatataaattccacatgtgcatttgtatgtttttatgtgagtgtgtttgtaaaatacacattttgtgtaaacatatagattatatgtaagaactataaatggacaggtaattgtctatttttatatgtaatctatctacttaatttctattttattacaatctctatctctatatagcgatttgccattgaagaggaaactactgacttttaaaattcttttttttttttttttgagatggagtctcgctctctcgcccaggctggagtgcagcggcgtgatcttggctcactgcaacctccacctcatgggttcaagcaaattcttctgccacagcctcccgagtagctgggattacaggtgcccgccaccatgcccagccaatttttgtatttttaatagagatgggatttcaccatcatggccaggctggtctcgaactcttgacctcgtgatccacctgccttggcctcccagtgggctgggattacaggcgtgagccactgtgcccggctgacttttaaaattctaattgacataaattttaaagtttactatatttttcatttgcaatcaaagcttatgtaacttttataattaaaaacattaaaaggtagtgatgtgctatactcttcaaatactgcattttataaaactatctgatatatataataaagttataaaacttgttcaaaaagaattaattcatcaaaatttaactagttacatgtttttaaagtacatggtgtttcagaataattctaagcagagatgtgcaaagtttaagacaattttaaacttattaagtgacttaaaacataaaagaaataaatggaattctcaggtttctgtgtaagaaaactaaaatatgtggagaatttaagagtttttaaattaattttagtttgaacaaagcttgtgaaaaggattccaaagttaattttcatataatgaacagaataaaataataattttgaaaaaaaaaagataaaagcgagaagaaaagggagaataaccgtatcaatggctaaacaacattataagaatacaatgatgttgttggaacaggaatagacaaacagaatattttaacaaatagactaaatgacccttttctgtatacagaaaaatccatccttccagcacaggcagggagattgggccgggagctcctttcctctactctctggctccaagaagaacttttccatgccctatttgagaaaatgggctgggcacaagccttgaacaatttgctaatcttataatatccaaataaaatatgtttctgtgaggattgacatgtggttacaaaagcatttacttaaaaaaaaaaaaaaaggaagttagatctccatcttacaccatggtcccaaataaattctaaatatattaaacagttaaataaaatattgggccttaataactgtatgaaaaatttattaaatctcttaaaaaagaactttctaggtttaaaattattcatttattcaaaagctattgaaacctcgttttttcagctagtaggtatacagctttaagacaaaagaactacttttcaaagagcttagaatctagctgaaagcacaactcaagtattgacaataacaattgatctttacattaggggaagaacagattgtagtaaggggaaagacaggagccgtaaccacgtaggcaaacacagaggcaagagaaaacatgagctgagaagttcattaatattgaaggttagaggggaagagatgactgacaaaagatgaagctgaagacgaaggccagaactgagtttgaagtgtcttgtaatccatgtggaggaatttatgctctatcctaagagcagtggaatgctattaaagagttttgagtgaatgatgtcacgaatgaattttagaaaattcaattttactgacttataagaaagacgaactggaagtgactataggcctgagagtctggttagggagacacacaaacagaaaattacagaaatgtgtccgaagagggtgagtttaaggtatcaaggaggatgacatacccataggactccactcatttacaagtcagctgaggtctgtaaggagagaaatcagaagaggattggctggagcaagctgagatatttgtagttaggcttagggtcaaattcccagttctagtgtgctctagatggctggaacacatccaagggaagtgtaaagggaagttttcattgtgaagagctaaggactgagccaacatgacaaagaagtagaaggtggaaacccctgggagtcaaagattcatatttggtgtcctggatctaagatttgtctgaagagaccacatgccaagaggaggtgtatataaagactggggagactaacaggaattctgcaattagggttgggtgtgagaagccggaacattctattgcctattacatagtgcattatgggacacatgtattttaataagcattgtcatgattcatttggaaatcgtagcaaagtaagacttttagataaggctcatcaatggaactttatcttctgtctctcatatactgcataatatgccacataatgatgttctggacaacaaaacacagtcacgtgatgtataatgatgttttggtcaacagtggaccacatataaggatggtggtccataggattataatggagccaaaaagttcctatggttaatgatgtcatagctgttataatgtcatggggcaatgcattattcacatgtttgtggtgatgctggtgtaaacaaacctactgcactgccaatcatatggaagtattgcacatacaattaggtacagtgcctaacacttggtattagtaataaatgactatgttgctggtttatgtatttactatactttttaatccttattttagattgtacttctacttattaaagaaaaattactataaaagagcctcaggcaggtccttcaggaggtattccagagaaaggcattattatcataggtgatggcagctccatgcatgtttttgtccctgaaaaccttccaatgggacaagatatgggggtggaaggcagtgatattgattatcctaaccctgtgtaggcctagactaaggtgtgtgtatttgtcttaatattttaacaaaagtttaaaaagtaaaaaaaaataaaaattagaaatagaaaatgtttatagaatatggatatcaagaaaaatatttttgtacagttgacaatgtgtatatgttttaagctgttataagagtcaaaaagttaaaaaacttaaagatgtagaaagttaaaatgttatagtaagttaaggttaatttatttttgaaaaacattttaaaataaattcagtgtagcctacataaagtctgcaatagtgtatcgtaatgcattctaagacttcacattcactcaccacacactcactgacttacccagagcaacttccactgttgccaagttcccttcatggtaggtgcccttgacaagagtaccaatgtttcatttttttaaactatatttttactgcactttttctatatttagatacacaaaaggttaccattgtgttataattgcctattgtattcagtatagtaatacactatacagacttgtagcctaacagcaatagactatagcatatagcctaggtgtgtagtaggttataccatctaggtttgtgtaattacactgtatgatgtttgcgcaacaatgaaattgcctaacaatgcatttctcagaatatatccccatagttaacatatctcctgtgtgtgtatatatatatgtatttatatattttatgtggttggattctatgtaattaaaaataatcccaaaattaaaatttaacacggtatttcttcatattcctcagtcattttaaattgctgcctaatgttcatccagttagcactttatctttttattttggtatcttgatgcacaaaagttttctttttaatttaatgtaaggagatgtgtcaatatattctttatggtttgtgctttttgcatcttttagtattattcatttttctgttctgagacaataaatatatttgacattataattattattatattctaaaagccttgctttttacatgtaagtcattaatctacatatgattgtatttgggatttcattttatgatctctataggtataattagttaggattatataattaatcatttacccattagactggaatgccatgtggatatcaacttttgtctaggcatagctctattttgagctctttattctgttctacttataaccctataacaataccacactctctttataacatatacgtttgccttaatatgtaattgggaagtctttccctattcttcagaattatcctggcctccttgggcctttttctcttctattatatatcaattatagaatcacttcttaaaatacaattaacacagtacttactgtggatcaaagttgaattaaagctgtagattaacttaagcagtgttgacatccatgagtatggtatatgtctgcgtgtatttagcgtgactttatttttatttatttattttttttgagacgaagtctcgctctgtcgcccaggctggactgcagtgggcgatctcggctcactgcaagctctgcctcccgggttcacgccattctcctgcctcagcctcccgtgtagctgggactacaggcgtctgtcactgcgcccggctaattttttgtgtttttagtagagacggggtttcaccgtggtctcgatctcctgacctcgtgatccacccgcctcggcctcccagagtgctgggattacaggcgtgagccaccacgcctggcctagcttgcctttaataaggttttataatgttcttcatgattactaagtaccctagtgtttttgttcctttggtgcaaggaagtattttatttctttcaaatctcattattttttattagtttattggccagtgcagaggaatacaatagataattattttttagtctatatctaggaaattcgtggaatgattttgttaatattatattgtaaattattttgagttttctatttggacaattaaattgattgaaaataataatacctttcttcttttcaaatctttatgtttttaaatttatttgttcttaaaatttctctcttgttagggcctctggtaaaatatttaagaaaagcaatgctagcagcaattttatgtctttcatgatactaaagtcatgattctaattgcctttaatgaataattattaatgattggtttaagttatattaaagaagttcacttttatttgcagtttgctaagtttttatagtggatggatattgaatattaccaaatgactctcttacttcattttagataaacatctttattattattattactattactattattattattattattattgttattatttgagatggagtctcactctgtcgcccaggctggagtgcagtggtgcaatctcagctcactgcaagctccgcctcccgggttcatgccattctcctgactcggcctctggagtagctgggactacaggcgccagccaagacgcccggctaattttttgtatttttagtagagatggggtttcactgtgttagccaggatggtctcgatatcctgacctcgagatccgcccgcctccacctcccgaactgctgggattacaggtgtgagccaccgcgcccggtcaacatctttattattttaatcttttaatgtggtgaatcacatgaatagatttgcaaatattgtcattctaatgttcttacaatatattcgattttgtcctgttgcattttatttttatacattactaacttagtatgacttttggtttatgttctaaaagagtgtatagatgattgagtttatgtgttttttgaacgtctaacacaattttattataaaacttctttagcttggagttttattattaggtagattttaatgaactgatagagtttttctgttttcttttttgagaaagagtctcgctcttgtcccacaggctggaatgcaatggtgtgatctcggctcactataaccttcgcctcctggcttcaagcgattctcctgcctcagcctcctgagtagctgggactacaggctcctaccaccacgcccagctaatttttgtatttttagtagagatggggtttcaccacgttggccaggctagtcttgaactcctgacctcaggtgatctgcctgcctcagcctcccaaagtgctgggattacaagcatgagccaccgcacctggccacgtttttaaaatagtgatgactttattcagattttctatttcttgtgattaaatttgttaaatttgtttagaaaaatgcccatcttgtgatcaaatttgagttcaatttgtttaggaaaattgccataaaattgttcagaatattcacagattatttttgagtatctactataattcttatgttttgtttgtaatgtctaacattccttgtctttgcaaataataaatttgaccttgttaagactctacttaatctttgcatttttatttcaataattgacacatttttactattttatatctattgtgttatttttccctgttgcttgttttctgactttttaaattgtacttgagactaaatttttctccaactatagttgttttatgcaaaagatttttttcttactttgctttttaatttctaattcaattcatattatttatatttttcttaatttttgaaagcaagtggactttttattatattttttattcctgattttattatattttatttagagaatgtgatctatataatgctttctttcatttttaggttaagactttctctatagtcagttttttaaatgttcatgaatcattgacaaaaaaacattttctaattgtcagatgaaggcttctgtatatgtgcattctattagtttgctattttttcctcctttatcagttgcaaaaagatatgtatcgaaggtttgaattaatattgattttccacttttctaattttgcccattcttcctttatatatttctagtctatattaatagctaaataagctaaatataagctgagtagttttactttccattgtagtattttaccattacatagtgattcttttacatgtataatgattttttttggtcttcaaatttcttttttgtctaatattgacataaatctctcttctgtttgtgtgctgggtttattttttccatctttttgctttcttttctttttctttttcttttttttcctttctttcttctttcttttttttttctttcttttttttttttgttgttgttgtctaggttagagtgtaatggtgcaatcttggctcactgcaacctccacctcccgggttcaagcaaatctcctgcctcagcctcccaagtagctgagactacaggtgtgtgccaccacacctggctaatttttgtatttttagtagagatggggtttcaccatgttggccaggctggtctcgaactcctgaccttgggatttgtctgctttggcctctcaaagtgctgagattacaggtgtgagccactgcacccggcccatctttttactttcaaattttgtacaataggttttcattttttaaataaataaagcagggttttgttactgctgtttacattgttttagaaaatttataaatttgttttcaagtgacatttataatgattgcttatatgtgtcattttattttgtgatttctttattctttttcaaaattattttctgccttcatattgattaaccttctctttcaacctccctccatttttagcctttcttttctgttataaacattattttacttactaaactataatgtaacttgcttatttgattcaaatttaaaattaataaatatacttgttatttaaataatataaacccttaagaagttttaaggattacctcctgtttaacttaaatattatatttgtcaaccagtactctagttattttagttcatgctcaacaatgtctatgtattgctttgtttactagtctttccagtgttccattgctagttaagcacccagaattcagagctgtaacacctgattgatattctcaactgtacaatttataagctgtttgtctttgtgcatattttttgtattttttaaaattactttgtttattttaggtttcatttgctctccttcctgtagtttcttcagtttttcagtaatctgagattttaggttattgatttgagagttttcttcttttctaatctaagcactttgaattaggcacgattctccagagaaacaaccaataggacacacacacagagacacacagacacatacatatatattcattatagaaattggctcacatgattgttaaggctgagaagtcccacaacatgctattcacatccacaaactgaagactcaggaaaactagtgtgatttagtccagtctaaaggcctgagaactgtgaaggggagggagagaagcaggaggacagtggtgtaaggtctgtttggagtcaaagggccaaaacctggagcaccaatgtccaaaagcagaagaaaatgaatgtcctggctcaaacacagagaataaattcaccttttctctgactttttcttctatttggggccctcaaaggattggataatgaccactgacattcatgggggccaccatgttttttttttttgagatggaatttcattcttgttgcccaggctggagtgcaatggtgtgatctcggctcaccacaacctccccctcctgggtttaagtgattctcctgcctcagcctcccgagtagctgggattacaggcatgcgcccccatgcccagctaattttgtatttttagtagagacagggtttctcatcttggtcaggctggtctcgaactcctgacctcaggtgatctgcctgcctcggcctcccaaagtgccgggattacaggcgcaagctactgcgccctgcccgagggccaccatcttttactaagcaattcaaatgttactctaatctggaaacaccctcagagacaaacccagaaataatgtttaccagctgtctgggcatcacttagcccagtcaagttgaaacataaattaatctttacacatttaatattatatattttcctctaagcactgctttagctttaacccagaatttaaaaatgttgcattttcatttagttcaaatatttttttttaaataagtcttcctcttttacctacgggttatttcttgttgttgttgatttaatatcccaacataagaggactttttccaggtatctttttattatttctagtttaattttgtcatggtccaaaattatactttatgtgatttttattgctttatatttttcaatgtttattttatgaaccagaatagggttcatcttcttgaatgttccctgtgcacttgaatagaatgtttatgctgccagtattgagtgaaatcttctataaatgtcaactagataaagttgattgattgtgttggtcatctacatccttactgagtttctgtttctcgttctatcagttactgagagatgagtgctgaagaattcaactgttattgtgaatttgcatacttcagatttatgaatttttgcttcatatattttgtagctcttttgttaagtccatatatatttaagattgttatgtcttcttgaagaattgacccctttatcattatataaggtcactattattactcctgacaatattcctttttgttaagtcttttttgtctgaaattgatatagctactccaacttcattttacttaatgattatatgattgtatcatgctgctaataaagacatacccaagactgggtaacgtataaagaaaaggggtttaatggaatcacagttccacatggccagggagacctcacaatcatgagagaaggcaaaggagaagcaaaggcacatcttacgtggtgtcaggcaagagagcatgtgtaagggaactaactcccctttataagaccatcagatatcatgagacttattcactatcacgagaatagcatgggaaagacccaccccatgtatcaattacctcccatcgggtacctcccattacatatgggaattatgggagctatattttaagatgaaattttggtggagacacagccaaactatatcattctgccctggcctctcccaaatctcatatccttacatttcacaaccaatcatgcctttcaaacagtcccccaaagtcttatctcatttcagcattaactcaaaagtccacagtccaaagtctcatcagagacaaggcaagtcccttccacttatgagcctgtaaaatcaaaaacaaattagttacttccaacatacgatgggggtacaggcattgggtaaatacacctgttccaaatgggaaaaattggccaaaataaaggggctacaggccctattcaagttcaaaattcaatggggcagtcaaatcttaaagctccaaagtgatcccctttgactacatgtctcacatccaggtcactcttatacaagaggtgggtttcccatggccttgggcagctccacccctgtggctttgcagggtacagcccccctcctggctgatttcatgggctggagctaagttctgcggcttttccaggtgcacagtgcaagtctaccattctggggtctggaagacggtggccctcttcttacagctctactaggcagtgccccagtagggaccttgtgtgcgggttctgacctcacattctccttccacactaccttagcagaagttctccatgagggttcctcccaggcaccatacctctgcctggacatccaggcatttccatacacccgctgaaatctaggcaggttctaaacctcaattctttttttttttaattattattattatactttaagttttagggtacatgtgcacaatgtgcaggtttgttacatatgtatacttatgccatgttggtgtgctgcacccattaactcgtcatttagcattaggtatatctcctaatgctatccctcccccctccccccaccccacaacagtccccggtgtgtgatgttccccttcctgtgtccgtgtgttctcattgttcagttcccacctatgagtgagaacatgtggtgtttggtttttttgtccttgtgatagtttgctgagaatgatggtttccagcttcatccatgtccctacgaaggacaggaactcatcattttttatggctgcatagtattccatggagaaataggaacacttttacactgttggtgggactgcaaactagttcaaccactgtggaagtcggtgtggcgattcctcagggatctagaactagaaataccatttgacccagccatcccattactgggtatatacccaaaggattataaatcatgctgctataaagacacatgcacacatatgtttattgcggcactaaacctcaattcttgacttctgtgcacctgcaggcccaataccacctgtaagctgccaaagtttgggacttgcacactctgagtcaatggcctgagctctatgttggccacatttagccacagctgggacacagagtaccaagtcccaagactgcacaaagccgcaaggccctggacctggcccatgaaatcttttttttttcctcctagacctcctggcttgtgatgggagggactgccacgaagatctctgatataccccagagacattttccccattgtcttagtgattaacatttggctcctcattactcatgcaaatttctgcagccggcttgaatttctcctcagaaaatgggtttttcttttctgttgcatcttcgtgctgaaaattttctgaacttttatgctctgcttcctctttaaacataagttccaattccaaaccatatctttttgaatacataaaactgaaagcttttagcaatacccaagttacctcttgaacgctttgctgcttagaaatttctcataccaggtgccatagatcatttctctcaagttcaaagttccacagatctctagggcaggggcaaaatgccaccagtctctttgctaaagcctaacaagagtcacctttgctccagttcccaacaagttcctcatctccatctgagaccacctcagcctggacttcattgtccatatcgctattagcattttggtcaaaaccattcaacaagtttctaggaagttccaaactttctcacatcttcctgtcttcttctgagccctccaaactgttccagcctctgcctgtttcccagttcccaagtcagttctacatttcaggtgtctttaaagcagcatcccactcttccagtaccaatttactgtattaacctgttctcatactgctaataaagacatacccgagactgggtaatttataaaagaaaagaggtttaatgggctcacagttccacgtggctgaggaggcctcacattcatggagaatggcaaatgaggagcaaagtcatgtcttacttattcactatcatgagaacagcatgggaaagaccaacccctatgattcaattgcctcccactgggtccctgtcatgacacatgggaattatgggagctacaatttaatatgagatttgggtagggacacagccaaaccatataaatgatacaactttttttcttgtttaaacttttaatctgtttacgtctttgtatttaaagtgtggttttgtaggcagtatataattgtgcatgtgagcgtgtgtgtgtgtgtgtgtgtgtgtttattcaatctcatagtctctgtatttcagctggtgtatttaaaccattgacatttaaactgatgattaacatgttggattgaagttgaccattttgctagttgttttttatttgttccatttgttttctgtttcttttttttctctcttccagccttctctgtgttaaattgaatgtctttcatgatttcattttacttcttttgtttacttatttttttacatctaccttagatattataagtgctttttagttttttgttgaataaatgaattaataagataatttctctataaaccattgtaaaaggtggaaaacacttttacctcaaccatataattgtttgtataactaaaagatatagtaaatagcataataaagaatttaacagtgtcttgaatatagaaagagctcaatagtagttatgatataagaaactttttctttcactattcttattttatttaatattatctgctcttttaatgaaagtcattccaatatgtctatattactttgtaaatttttaaattatgattttactttctttctcgttctttctttttatgtttttttttaaatttttgttctttgagacagggtcttactctgttgctcaggctggagtacagtgaaatgatcttggctcactgcagcctagacctcctgggctcaagcaatattcctacctcatcctcctgagtagctgggactgcaggtggatgccaccatgcctggctaatttttatattttttgtagagacagggttttgccacgatgcccaggctggtctcaaactcccgagctcaaatgatccatgcccctcagtctcccaaagtgctgggattacaagtgtgcaccaccacgcccagcctatgattttactttcacttagtgaattaaattcatgtttctttttttcttctactatctctttttgcttattctggctgccaaatagctcttcttgcttatttttctgacaaaacttatttttctataaaggtagcttactttcacaagtaacctaaaattaatctttttaataaacagattataaatatttttaatattttgatagtatctttaattattgtgtgaatatatttgaagtgaaagtactaatatatgtaatattaatataaaaaatgccaagttttctgcatttgcatttactgttgcccaattcttaattaaagtattatctcaagtggatatattttatacatggatatttttaatggaaaataacaaaagaactattgttaaaacctactcaagtctaaaacaacatgtatttggagattaatcagatcaggtttaaaactgttaaaaagtaacaaatattccttaagttttcccagatagaatgagaagaagacaaataaattcaagtcatcgagcccaagctaaaattccctggttaaaagaagaccagtgaaatatatttttagaggaagactgaagaaagatattttacagtgcgacacaagcaaattatttgcttgatagcagctgcacagttttatgtagatagtatgtataaaaatctattgataatattttaatacaaattttacttgcttttcatgtgataagtaggtgaatgatttctttttccaacagtcatttaataatggtggtcattgctttaatttagtgaggattcttactactctttttaggatttggatgtgtgtggatgttctaatagtcctgaattctggttctagcagtttcagccagttgaagctatgatccgagataaatgtgtactgttactacagaaaactaatttgataccatcttttacttgatatatcttgtttccttttgaacttcttcttagactagctggtctttaagtacaatagtttaagagttctgcagttacattaaaaatataatccttatcttttggataaaaaggcttttaacattaagtccattgcatgtctcttttaaagttatagtcactccacatcttacacttttgtatgtctccattccccccacacacagtccttgccttacaatggccctatttaggatttttgggtttattatgatggtgcaaaagcagtacacattcaatacattcagacttaagatggggttactttgaaaacacacttttatacttacgatgttttcaacttatgatgagtttattgggacacgtttcctttgcaagtcaaggaacatttgtactttgttattagaattagctttggaggctataaagctttttcaatgaatgacaaaagctgtattcattagacttctgtgtagaagattctgcccaggaatcacaattgttatgctagtatattagttccttaattaaacaaactttttttatatgcctattactgtctgactgtggagatagtgggattatgatgatctgtaagagccagtgtttatatagcttggaatataccagagtatacttacatgaatattaatgttatgaaagtaataacatgatggattaaatagttctttataattctcaaaaggctcaatcatacattcatgtccatcattacagttttcaaacactgaaacacattatcacaatcccatttgaagtatgttaaatattttgcccaagagcccatgagtggtaaatgcagacatagatctactatattgtaggtcaaattttctcaacctgagcattattaacatttgacttagatcattctttgttgtggacagctcctccatcattttacgatgtttgcagcattcttggcctgtagtcactacatgcagtagcatctttctccctcagttatcacagccaaaaatgtctctagatactgtcaaatgttcctggggagcaggcaaaatcatctgccattggaaaccactgatgtagccgcctgatgatttctctaatatgttacctaaattttggtagagcgatatttcatataagttaatatgaagctggagttatagcatgtctatataatggaaatgctttcactggagtttatttactttaaatagcttgacaaagagatggcatcaaagaaacaaagcctttgcaatcagaaagaccatttttgaggccagacgcggtggttcatgcctgtaatcccagcactttgggaggtctagcagggtggatcacgaggtcaggagatcgagaccagcctagccaaattggtgaatcccatctctactaaaaatacagaaaattagccgagcttggtggcgggcacctgtaatcgcagctacttgggaggctgaggcaggagaattgcttgagcctgggaggtggaggttgcagtgagccgagatcgcgccactgcactccagcctggcaacagagtgagactccgtctgaaaaaaaagaaaaaaaagaaagacaatttttcaatcccagctctatgtaaataatgcaaagaaatagtaatgttctcaaatccacagaataattaattccttctctctaaatcttctcccagatactaattcaacttcttgaatcaattcaatttcacaggctctctaattggcatctaggtctcatgactgcaatgcctcctttttaagaaaatattttaatcttttattttattttctgcatttcccagtcatacacacaaaacactcctagatatataataaactaatgttttcaatattttgaaccctagtgataaacaataaatatagaagagaggtatctatgtgagtcattttagtgtacgttaaatgtatggggaaactggtatgtgtaatagtgctatctaagcatccaggtatgactagtgaaaaatcaaacatttttctaaagtagaaagatgcaatgaattttttaaaaacttctccctactgtataaaatagtattatattttataatactaaatagagtattaaatcacaaaaagaaaaccatgtcattgcagtaacacactgattataactgatgagaaacaaataattttatatacttctatatttttatagaagtattggtaattgtcttatctttatcaaataatattcttagtgtaataatataagaagtataatgaaaatatttactagaagacaccttatatggggtaccttttaattttaattaaaaattaatctgctgtgagattatatctcaaggaagtatgagtatacttatatacttatatagatacagaaaagtgcacagattatccacctatagcttgataacgtttacaactatacacgcctatgtatccacagattaggatttaagcacagagacatgaggatttttaaaagacctatagtggacacacattttacatggtttgacttcttattaatgcagttattaaataaaaatgaatgatgtaaatattatacatagtattttatcaggtaccataagatatatgaataactacgcaaagttataatgtaaagaatttctttgaatttgggaggcatataaatggaaactttagccaacaattcaaaacattctactgttgtgtgcccaagctcatcttccttagaaaggaacaaagactcaagaaatcacatgatcactctgtctgattaaaatggtaatcttgagaaatgtttcatcatttagtattgtatcatgcatagtttcgaaaacctactttatgtatttatgtccatatgttacatatttttattatagtagccattaatttgtgtatcagaattatgacattataaaataagtattttaagaccaatagcctgtatacagtacacagaaatggatgagggaaaagatggagtaagtaaacgtactgaaaggcaatattgcaacaccctacacaggaaatgttttcaccttgaattaggaagacaaggggaatgaatagttagagacaaataagaaaagtgttatttaggatgaatcaacataacttggttattgaattgataaaaagattaaagtagacagaatttgctatgtttgttaagaatataagtgtgcgtatatagtatatgggttatttgaagaataattatgccaaaataaaattagggaaattataaaggcaaacttttacatttgcagcaggtaaatgggttccagtgtgtgtatattaaaacttgtattaacctgtttcataaatatgacagtttgggcacaatgtcagtttttggcagctggttctcattcttcctaaagccccagttctcaaagtgttagagaagataagaggacagatgaggtcatagcagtaaacccacactgggaactaatgagacaaagagttgtcactgtcttggcagttttaaccaatcacactttccaacatcttttctgatttttttcgagacagggtcttgctctgtctcccaggctggagtgcagtggtgtgatcttggcttactgcaacctccgcttcccgattcaagcaattctcctgcctcagcctcctgagtagctgggattacaggcactcgccaccatgcccggctaattttttgtatttttagtggagatggggtttcaccgcgttagccaggatggtctcgatctcttgacctcatgatctggccgcttcggcctcccaaagttctggaattacaggcgtgagccaccgcaaccggcctccattggtttttctaataatatgtcagctttaatgagcaattattaccctgtgaaaaccacctctgggacctgaaaagacatggattgtgctacctgacacctcacctctaagccagctagctccacaggttcacttgtgattttttattaacctcatagtgatgagattgaatattttggtccacacgtacattgttgtggcagagttttaccgtatgtgacacaaaacgcactctaagaaaaaaagggttattcaaccaattaagatataagattatattttgaaatggagcagtctctgtaagaaaaagttgaactcatatttctaaatagtaatggtcattttaaatgcctgagattccaaaggaaaattatagcagcaaactaaagaatgaaccttagagaatgtttgtatttatgaggtggatgaggaaacaaacaaacaaaaaagggagttgtcacaaatgtaaaggatgaatcagaagcatataattttaaataaaaatatttactgcatttggtaagttggagggagatttcaaatgaagctagaaactgaaatgtcaggactcatgtaaatagaaccgatcttcattatttgcagattccatatttatgaattctctacttgctcaaatttatttatttatttatttatttatttatttatttatttatttagagatagggcctcactctgtcacccaggctggagtgcagtgatatgatcatggctcactgaaacctcaatctcccaggctcaatcgatcttctcacctcaacctcccgagtagctgtgaccacaggtgcacatcaccacactgggctaagttctgggtttatagacctgagccactgcacctggcctcaaatttatgtttaacctctaaatcaatacgtggacactttggcattcattcttggacatatacagagtggtggaaatgtttgagtaactcagtgcgcatattcccagttgaagtccaaggcaatgagcaatgctcttccttcttgtttcagttctcatgctgaaagtaagtctccttctccttctcctttctcctttcttcttcttcttctttttttgagacagggtcttgctctattgcccaggctggagtacagtggcaccatcatagctcactgcagccttgacctcccaggattaagcaatccttccacctcaagcctcccaagtagctggaactataagcatgccaccacacaagactaattaaaattttttttttttttttagtagagacagggactcactcttcagttgcccaggttaacaagcattcttttttttttctttgagatggagtctcgttctgtcgcccgggctagagtgcagtggcgtgatctcggctcactgcaagctccgcctcccgggttcacgccattctcctgcctcagcctcccgagtagctgggactacagacgcccgccaccacgcctggataattttttttttctttttgtatttttagcacagacggggtttcaccgttttagacaggagggtcccgatctccagacgtcgtgatcctcccgccttggcctcccaaagtgctgggattacaggcatgagccaccgcacctggcccaacaagcattcttttcacaacatgtttagtgccctgtttgcctcatttttgtgcttattgttggtgtttaaaatggtcctcaagcatattgttgaactactatctagggttcattggagcaaaacggctatgatgtgccttatagagaaaatatgtgacttatagagaaaatatgtgttagataagctttcagatatgagttatggtattgttggatgtgagtttaatgttaatcaacaatatatattaaatcagtgtctttaaatagaaacacacacaaaaggaaggttatatgttgattggttcatgaaaatgtgtgagtaaaggctcgcaggagcatagccctatttctcctaggagcagtcgttcagtattcgctaattcaatgttcacaatgactttgtaaaaaaatgattaccatggataatgagaatcggtatacaaacatatatatacacagacatacacacatcctttttgtgtttaagaagttaaagtagaaaattgtagtataccagtattagttacagtctccaagaatacaactataaaaacatatttaagccattagtaaatttcattatattacaatcagaattcaaataattttgtttaatatttgcttctgaaactggtgcaccatttagctgttttgataccataaacaagtaaattttataaatgtagatatatgagatctttcagttattgtgattgactcatttataaaatgtatctttgagtgagtctatattaggatttctccttttctgtgtaaattaagtaaaattcgatactttctctgctaactttatttaaacaatgcttcttgagctctctgttatttgataggaatttagtagttcagagaaatcaattgactcttctacttcaattttttgtctttctgaaatcttgaataaaggctttaaacctgatggcaatacctttatctctaaccctgttcatgtgagagtgcataattgtgcattttgcaatttccttgtctcatttgttctctgttgtttatctgcttactcctaaggctgggaaaagtgataatatatgagtggcccatgtagtaggtagaaaatgagggcaagtccatggatatcttatccatgtcttggtactagtggcatgcaataatatgggcctaccaaggctcctagaagattttttaagctttaagttttttttgttagatacactgccaatatatagaagagactataacatcggaaaatatgagtggttagttacattcaggccttgctgtttgcagccttaaacttcatgtaaaacctcaatgaaacatattttctctacttttaagataaaggatttgaacaattgatctaattctctcacagcattactgtgattatcagaggaataaaaggcatttttagtactctatcttttcttctgtaaaatacttcactttctctgtgtttgaaaaatgaggtccctcatagaacaaggtcagtattatgggagaatgagtcatttaattctaagctgtaacatgttacaataatttgtcttaaaatggttcaatgcagatgtcatagaatgagttcagatgggtctgcagaggcaaattcataggaaactttgttacctctctgtttggatttatgaaactggttctctagtttcattgtatagtaatgcccaaaaagtgaaaagcctaaacttctacttttttcatgtttttcttatgtattagtctgttctcacgctgctataaagatactacctgagactgggtaattctgaataaaagaggtttaattgacacagttccgcgtggctggggaggcctcaggaaacttacaatcatggcagaaggcgaagcaggacacctcctgcctggcagcaggagagaaagaagggaaactgccactttaaaaacctcagatctctgccgggcgcggtggctaacgcctgtaatcccagcactttgggaggccgagacggacggttcaagaggtcaggagatcaagaccatcctgcctaacacggtgaaaccccgtctctactaaaaatacaaaaaaaaaaattagctgggagtggtggcgggcgcctgtagtcccagctactctggaggctgaggcaggagaatggcgtgaacccggcaggcggagcttgcagtgagctgagatcgcgccactgcactccagcctgggcaacggagcgaggttctgtctaaaaaaaaaaaacctcagatctcgtgagaattccctcactaccatcagaacagcatgggagaaaccaacctcatgactcagtcacctccctcgacacatgggtattacaattcgagatgagatttgggtggagacccaaagccaaaccatatcatcttagctgtaggcaaaaaaaatgggatatatctttattctttgactttctagaaatgccactatctcaaaaatataagcctaggagacagagggtgaaggtagggtaccattttctatggtagtggggatgagtgatgcttttttaatcctattagtttaatataggaaatggacaatgatcatgtaaatgaaattaattacataactaccaaatgaaccaaaaagaaacagaaaagggttctgtgagagagaactatggggaagattcaccttaaattagatgtgaatttcctttcactaatttctacttgaattatttaggcatactcaggactcctgttgtattttttaagattttgaatttggatcacctttctcatcacaacatttatcttatttttaatttttaaaaatatttaatttttaaacacttaattttgttgtcctctcctccaaacttttatccaaccaccattcacctttctcaagaagaggagctaccaaaataagctggcggtaaggccaggagggtaataacaaagcagaacagagtgcgtgtgcagaggctactgttccctgctctagatgtgaacctggggacttgtgccacagggccctggagcaagaatcagagttccaaccaagatatctggacctgtcccactcatctcaaggatagattgtgccggcctaaatacattatacctggagagctgctggtgttctaggcctccgggaaaatagcagagctgtgatattaagctgagttcccctatccttgatcctcagggcaccagactttgtagttgaaggcatcacaagcagagaggttctacttgtcactttgcaacaaaactggcaattttttagctgttctagcacctgcccacaaggttactgtgccttacactgctgtgtgactccttcatttattatactcaggcaggcagatctggatatgaaggtgaatagatccaccagtaataaaaaaaaaaaaatactacctaaggaaacccagcagccagagaaaggaaatataagtagaacactcaggtaccaaactgacatttaggcagaatttctgcagctggttgatgacaattagaataaaaataataaagatttagggtaactttaggtttaaatcattttctaagactaaaatgtatgattttgagttcaaaaatttagaaggattcagtgagaatatggtccctatggagatctaaattagtggtccagaaggtgcactagaatatgtatctgaacaagagcaaagctgcaaagagatggtaatcataaaggaaagcatacaagacagaagacagtggcaggcattgttcaatgtgcttttttttttttttttgagacagggtctcactctgtcacccaggctggagtgcagttgtgcgatctcggttcactgcaacctctgcctcctgggttcgagtgattctcccacctcagcctccccagtagctgggactacgggcatgcaccaccacacccagctaattttggtattttttggtagagacagggtttcaccatgttgtgcaggctggtctcgaactcctgacctcaggtgatccatccgccttggcctcccaaggtgctgggattacaggtgtgagccaccatgcccggcctcaatgtgctttttgtttttaacttagttaatcgttacaagaaccctttgacatagaaattctagagaaatataacatttgaataatgaaaaattttgtagtaaaggaataaagaaaaaacaagctataaaaatgtaatagaagaattctctcttgatgaagaaatgttaagtacagatagaaagagctcatcaagttccatgaaggattatgaaaaaataaaattaaaagatgcattcctagacatatggtaaaactcaattccaagtatcaacagtcaaatttagcatttcaatacaagaggttagaattgataaaaattacatttacaaaatatagaggttaaaggactttggcatcttatctttccactatctaagtatttttctctgtggtgcagtatgagtccaacttacctttgtctaggataataaaatatcaaaataattatttggatgaaatatccctttttcacactgaacttaaacacttttatattatacagtcagcccttcatatctatgggtttcataatcacagatttcaccacagactgaagatattttcaaaaataaataaatgaaaaataataaaataatacaaataaataattatgatgactatgtagcatctacattgtattaggtactctaaagataatttgaagtatacaaaaggatgtgcatagattatatgcaaatactatgccattttatacaaaatgagcatctgaggattttggtatccacagggttactgaaactgccccatatggatactaaaagacaactgtattcattggccatatacaccaaataaattggaatttctcttttatctccggatactatttattcttaaacacaactattctgtttttattataatggctttatattatgtttgcatatcagataagatcatcttcactattctttcatttataacttttggctattttaaaatttttattctttaatatgagtttgaagtcataacatctaaaaacccctctacctcatcaaaaataaataaataaattcttcctgtagctgtctttgtacttggaactgcatatgttattttgagagaagagttatttttataatactagtttttacatataagaaattgaatcttaattattgttttcatttctggctgattattttctaaaatgttattttcatatcattttcgaagatttataccaattattttttctttccctattgtaaatactagaacataaaaaataataatgattaatactggtgacattgcatactcttgtagtagttctagattaagggaaatgatcttaatacatcgccatttagaaatatgttcaatgttgagttttggtatatttttaaaattatatttatgtgggcaccttctattccagtgcttactttttataccacattgaatcatgcttcccaaacattacctcttaaatttacacctagagtggaagtgaatggggtaagagaagaatgttctttgtgctctggaaagtcagcattggtaacatgaggcacatatgcaatcatatacaggagactgtatcaaaaatggaataagattttcttcctatttagactagccccaggctagtaatcctatatgtatattttgcaacttcccactgaaatacccatgactaaactacagtgtaaattatgacaggcattcaagagtcagacagtatcagggctacacctctagctgcaaaccaataaatttgttctgttgcagaagtctaaatgtgtaggataataactctatttctcagtccagcttcatggatcctgtagaaaaacaatggttcagctatttgtctctttatacagatataagtcttcatcattatcatcatgatcattattttatcatgattacttgattataagctccatgagggcagggatttttctctattttttcatgtagaaatacccagtcactagaaaagcatttgacacataaaatgtactcatgtactcagtgtaaatgctatacacttcaaagtttattatttgcatatgtattttattcacactttcagtaagtatttgtggagcatttcctgggtgacatacagtattctaggaactgcagacaaaatagtaaatagaaaatagaaggtctttgccttcatagaacttgcttcttaaagcagtagttctcagattttgctgcacattggaatcacctaaagagtttttaaaacactgataccagcttctacctccagactttctgatttaattcgtgtctgatgcaacttgaaccttgggggttcttcaaaagttctccagataattgtaatgtgcaccagaatttttgaatcattggcctaatatacaagttggcattaaacaattccaggtttcttacttgagagtgataatagattgtgttacaaaagccaccactttacccactgtgtttagttcatattatattcatatgtttactattaatattattttaattatgtcctatattcttgaaccaaaaaaaagttccttatggtatttttgagaaaccaaccaacactattttctaaaaatacatttatcaaaaaggaggtgaaatatttaacatttcagttgagccagttatacacctacctctattaaatggagatgcaaatattgtttacttttatctcaatcaaatatcacattaaaatgttattctccatatgtatctaagaaagctttaaagaggaattttgagcagttcttgactacttgactgaacatataatctattattgtattttatatggagaaactctcttatttatatgtttatttatttatctggtttccagatgctaaagtgtatgttcattatagtacattatagttcattaaaatgttcaagtctaaattgcactcagcatagtgaaactgctgctatttttcttaaacattatacctcttcagaacagatttgcaataggtactggcccaaactgataacttccttcccttcattttgcataatacagcaattttggtttcaaaatgccaccacaatcttaaatattctgactagctttgctgagtttgcagtagcaacaatgataatacccattgtaaaaacgaaatgcagaaatagtgactgtcaaatcctaacatgttccttatatccacacttcagttttcttaccagtataatctacattccagttaataatttaatgctaatcagctccttatcttctgaaaaggagagtctgctttgaatcataaggcagctgaccttgaaggtaggtttaatatatgcagatttcttatatcacctctaagctttttttactcagagcattttcttggttacatttagctcagagctgtgcaatcatcattttgtctatcctaacagtaactgatttaataacgatagtttttactcttccttagttttggactttacatttatttgtataactagttttaaataacgtagtgttttaatgtgcaaataaaataaatataaatagttcaggtaaaccataaatactagaaagaatatagtagcatctttctaaacaaattctgctatttcacaaggtgcttatgtatttctgtcaactttctttagattttactgtcaaatggcattttttagtagtgatgtgataaagatttaaaattggttccttggactacattttgtgaattgaaattcaacatgaattgagaaatgagctatagaattttattatatataaaactgtaagcaaagctgtattattataataaaactatgtaagcaaagctatagaagttcagtttaaatttttaaaattttcaacaaatcgaggacaggaacatgtttcaaaaataatatcaaaattagaatttttacatgttataataacttcggtttaaatgtgttaatgagttaatgcgattgcatagatctaaactgaacaacaaaggaaagagataagaaaaaataatttttgtttatctaaaaattacacataatctgggctttaggaaaaaaatgtataaagctctttggaaatagaatcccatcataagaggcaatttcaaacttctttgtatatacatggtagtgacttgccttaaatattaaaatacccatctttgtttgttgtaatttgtgaatttacttgttttcccccatcaaaattaggaagaagaaaatacaagatttctatttcaaaagaggaagaatggttagattaggacagtggcagcaaggaaatatgatttttttttttaattgagatcctttttgagaaacaaaaggtggctttactttgaattaaaaagtcatttatgttgggtagagttcttcacttaatggtttcctgcttacactgaaaaatacactgggttgatttagattgttattcttcttcatttagcttttagtgatctcatttgtgtaatcttcatacttgaaaagtagaatatgaaaacaacaagaactatagatgtgctttggagattgatatgtagtgcttttgctagtgaaaaataatctcaaagaaataagtttaaaaaacaaattttcttaactctattttacaataaaatgtttttatattgttattagcattccaaattattttcatgaaaattattttatggaaataacccttattttattagcttgctttctattttaaatcacgctgtgtaagaatgattaaatcaaatataaagtatggaacaatttaaatgacttaatggtcttccagataagatagaaatgtttctgctattatcttgaagaatcaatagtggattgggttgtcttctttaaacatcatgctgttttcactgcttgttatgttgctctaaagaaatttaaatatttcacatgccagttgcttgggagaaacatttttcaagacaattagttgtgctatttaaaattaaccttttatctacaaataatgttgtcattctctctggagtgtttgacctaactagagctaagatggcacatcttagcctacaaaacatgagatttcactaagtaaaagtaatgttttgctcagtttagagaacagatactggaaagcaatgttaagagagattttcagtagttcatagttcatcatatatttatattttttgatacagattaaatttatatatctttagaaaatgtgtgctacttattataaattactgttttatgtattgctatgtataaatgatgtgcttcccaatttaacctttagaagtaaacttaaaagcactcataaatttctgttgaatgtagggtttaataacataggtcttatttatttaaggataattttcttctactatcacttaggcataaaattaatatagttttatttttaactacttaagttcttaatctaatgtagccttaatgaatttacccatgtaaagtacttgatgaagccatcatgaaaggctgcttggctaatatccatcagtccccttgctgaaaataactgaattttaatgtgaatatatataaaaaaaaccggtaactgtttcatgtatctaaggtttatgcaacttaatttaataatttcattttttaattgtgccatagacatgtttattgagttataaaaacaccacaatcacgaatgaatgggaaacacaaagaattagtattaagagtatgctgtttgttttgattatgatgcataactaaaaacctaaaattaactgtaacttaaattgtttctctgtggctttttttttctttctcatccaccctcttcattctcccttctcctctttaaataaataaaaatattctgaatgtagcttaactagttttagaagtagagaggaagattggttataaagaggaatgtaaattaatttataaacacaagttatctcaagttaaaatcaatataagagagcctgtaatctccatgtagccaaaacctgggattaactaaagtactcaatttcctttgtagatcatactaattagttttcagggtaggcacatcttaccaattttatgcacttatcaagagtcatttggatttgttacctagtgtatgactgccatttgttcttgttatttcatttcacaatttcgttaaaaattgtgctatctaatgcaacatgagcattaaaaggcttttattttattttatttttttgaaacaaactctcactctgtcctcctggctggactgcagtggcatgatcttggctcactgcaacctccaccttccaggttcaaatgattctcctgcctcagcctcctgagtagttgggattataagcgcatgccaccacgcctgtctagtttttttgtatttttagtagagatagcgttttgccatgttgctgtggctggtctcaaactcctgggctcaagcaatctacttgccttggcctaccaaagtgctgggattacaggcgtgagctaccgtgcctggctaaaagactttttttttcctccactataaaaaccaagggaaatactgtggaagtagataaaagcaaatcgactaaagtttagacaatattttgaaaaactaaaattctagaagggttctagaatttttgctttggattgccttatgggttgctttaacttttttctccattaaaaaataaaaaactagaaatcaaaggcaatgtatgagacttatgaaaaaaaatttagtaaagaaccccaatcagtgcattcttactcaatgaaaaggtcttggttttacaaacagtagcatccatatccccctatgtaaaataagatgaagtaaagatatatctttttatgactttctgttttaattattttatttgcttaatcagttgggtaaattatgagtcctagaatttaagaaaagagggcttccactgtactttgtactctccttcagagaaaagctaaagaaaccgcttcttttgctaggctgaggctgactgaattccgtgggtgtttctacatctgaatatcattacaaagactacccacttgaggagatatgcttgctattcaaatctaccatatcttctggaaattcttgagttcttactctatgaaatgaagaaaataacataaactaacatgcatggggcacaggtttcttcttgaatgccaactctgattagttgctaattgctacttgaagatctgtgcttagatccatctgtagcccctttcaccttagagtcaaatgcctggatccggtactgtcacccgcgggaacagactagggtagaaggataaaactatgacagcattgttctcctgagctacagccacatttcttttagtgttttccagatgtataaatgagcttttcctatctttttcttttttactttttcttctgttgggacactcccgtcagtgacatccctctgtattggttagttatttcatagattagaaagtttgtgggctctgcacaattcatccctttggttcctatagaaaagaaatgtttgttaactcatttaaaataaggactacttcacgcaaataaaaaccacttctgtctacttctctaaaaactgaataacctatgtctagtcttcattaaagaaagccaaaaaagaaagtttattccaacatattatcttcacaattaagagtatacagaatatgagggcaagaggactattccaatgatcactgtttgatttagtgaatctggctgctaaattgactctaagctattttctttacagtttgtcacatggtttagagtactttaagaggccagccttcccgggtgaaaagtacaatagtttctaagacagagtattcataaggtttgtggtgttaagaaatattacttttctgcaatctttaacaaatgtggaaaaggacattctgaatttataatgtaaatggggctggaattctttcttggaaaatagaatcaataaacatattttcagaagtaaaatatattgattgagaactattgtctaaatattccccaaaccctagatgttccttgtcaaatatacacacagaagatgtactgtgctatatagatgaggattgatgataggaatatgtagatctacacgttagggataattttatttcagtttaatgacatcagaattcaaaagaaatgaaacattatacatgtaacaattattgaaatgcctcccatgtactagcagctgtactggttctgcccttgggaagtttattagcatagctgggacacaggcctataaatagataattaaagagaatattgttaaaggccatattagggttacgcctagggggctgtcaggatatgtcataactccccacatttcaaattacaaaatttgctttactccaaaataaaggtagctttattgtacatttaagaaaacttgaaattgtaaagtgtttatgtgaaatgttaacttacagacttgatttaccaaatttatagcagtaaagtaagtcccatttttcagaatatgaggtatgtgatttcagctccttaaatgggatacctcacattattattacagtttaaaacctatgagattttcttttctatttttaatccttctcttaatgatctcatttattgtctactggaaatcaatttaggaaatcatgttagtccactaagcacttcagataaggctattccatgaagcattccaagattatcacaaggaattgctttcatatgccataaaagaagaaataagcagaatatggcctgctgaagaaggttacagttttacagcccctcccattgcagctcttaagtcactcagttacagttaactttggattagcactcacagattgaaagcaaaacacatcaaaacactcatcacgcactctgggcttgtggtgccacttgtatgtgtgtttctaaatcaatgatgagggtatcagaaccaatactggacatggacatggcaaattacagtgaagttttggacccaacttacacaactttggagtttgaaactatgcagattctatataattcaaatggtgagttatcatctgtttatagatgtaaagaaaagtaagtataattggagaaggtggaagactgagcttccaaaggtggtggctcaatgttttttttgctggagaatttagggcttgcttttaaggccacagatctgagcttttgcacttcattacaaaatttaagttaataatgctgtggctattttgtgttagaggtagaaaaagcctggttttgtgtaataaagtaatgtcagaattctgtcatgggccagttagacaggtaaaaagagtagtctcagctgttattttatttgctgtaaatcatagtaatatgtcatattggcagattggctgtgaaagtatattttctaagcaatatttaaaatgacttatggaacaaagtttccatagaacattagggagtttcactgattgtctacccttttccttataattccagttctcaattgctagtgatgagaaactacatttaaaattactatcaggtttttgcattgaacgcaaatatgaaagggaataaggcttgtattataacctcacctgacaggctaatgtttagccgcacaaagctgttggtatttaattactgtaacattttaactttaaataagacatgagttttttaggggtagtgtctttatgtaatacagcttactattgactttgaatttagacttaatacccggtaaaaaaaatcttgtttaaaatatgttataactgttagaactcctaagatcgagtaattatgtatactttggaaaatgtgtatgtgtgtgtgtgtgtgtgtgtgtgtgtgtgtttaatgcaagattgagaatatatcttgtactgaggatatcttactattctactgtattgtataatttgtatgactggtgttctggttctatttttaataagcagttccttattagtggggattttaaaaaatagtcaaaaggtgaattctgaaaatttagcacaactatagttaaaataaacctgtagtgcaactttcaggaaatcactgttttgtgtccttatgtttagacttgactagagatatttaatagagtatttcatcagaatcctgaatttaaaaaacactcatgattaagaaatggtagggacatatttgccataatcataacacttatttactataagtgtttaacaaatgtactgaaataacgaatttgtatggctatatccaaagtatggtgtaacttgtttgtttgtaataatgttgtcagcaatatgtaagtatggcactaaacttgaagcaagagttgaatttttcatatttctatatagtctctcagaatacaatcaattccaaacagttctaactttcatattgtcaatatctgttttgttaatgttaccagaagaaaaatgtttagcattttaatcctatgtcacatgactaaccctaagcatattctcattaaaatttttttctacttcatgaaattatatatgacaatatttgtctactcagaaatattagtaagtagaatatatgtaagttacaaaatataatcaggacatgacaacctttagtattatccttttgttagctatacaataatcagttgttaatatacaattttataatgaagttttattacatatatttaatatcttttgaatgcatatagatttttcaagatgtaatccacaatattaactcatttaagaaatattcattttattataaatatctacatttaaaaaataattattccttcagaattatgtattagatgacccactgtatcctgggcataatcctaaaagctggaaaacagaggactaaataagacagataaattctctaccaacatggggcttatattctgtgtgtaaagatgggtaataaatgagcagaccaatgcagaatatacttttcactaataaagttatataaaaaactaaggccatttaaaaagctaaggccaggtgtggtggctcacacctatagtcccagcactttgggaggctaaggcaggaggatcgcttgagcccaagagtttaagaccaacctgggcaacatagtgagaccttgtctctacaataaaaaaaaataaaaactagctggatgtggtgatgtactcctgtagccccaactactcgggaggctgaggtgggaggattgcttgagctcaggaggtccaggttgcagtgagctaggactgcaccactgcagtccagcctgggtgacaaagcaagtccctgactcaaaaaataataataatacttaaaataagcaggggtctaggttctacttgaaggacagatgggaggtgacatttttaaatgtgtgttcagagaaggtttcacacaaaatgtgagactttaacagaaacctggtagctagctcaaagaaacgtttagggaggaactttctttccagacagaaggaacagcaggtgaacaagttctgagatgagagtagccttcaatgacgacgaaaaaaaaaaaaaaaaaaaagacggtattgctggagaatagtgaactgaatgaaaagtggtaccagatactgggatcagagatttcggggagttttacgggggtttgacatgcagggtttacaggctgtgggaagatgcctagacattattctgtatctggttacgacagggttggatgcagagggtgacatgatatgaattactacagcaatatcacttaggtggctttgaggtaacaaacagtagggcagcaagaatggaaggaaagaacttagatagcaggctgttgccataatctagaggaaagatgatggttgattgaataaggatgtccatagtgaaaagttgtgaattaaatatgtatttcaggccaggcgcagtggctcacgcctataatttcagcactttgggattataggtgggcagaccgcctgctgaggtgggcagaccgcctgaggtcaggggttcaagaacagcctggccaacatggtgaaaccccgtctctactaaaaatacaaaaataagcctggcatggtgacacacgtctgtaatctcagctactcaggaggctgaggcatgggaatcacttgaacctgggaggcagaggttgcagtgagccgagatcgcaccactacactctagcctgagcaacagggggaactcaggctcaaaaaattaagtaaataaataaataaaaagtattgtaaacatggacttaccaagggattggttataaaagataaaggagagaatacaataaagactcacagattattggccctgggaaactggatggatccattgactgatacaggggagactgaaggaaggaagaacaagttctaggggaaaaatgaaagacttttgtttttgatatgttaatttacaattctgattagatttcacaatgaagttcttcaataggtgcttgggcatttcatgttgatgcccatgggagacatcggggctagagataaaatattggaattattcatcctacagctaatatttattgtcatggaactgataaacttcccttgggaaagagcatagttggagaactaagccctatggtgtcccaaagttaaatgttcagaaataagaaaggagagcttagaacggaagcagccagccaggggttaaaaggaaagcaccagtgtggggtctccaagaagccaatgaatggagtgttatgagcctataaataattagtaggacaatttagtcaggaaatagtactaactctaactgtaatcttccttttttattgacagatagttctgccccagagacaagtatgaataccacagacaacggtgtcaactgtctgtgtgctatctgtggggacagagcaacaggaaaacactatggggcatccagctgtgatgggtgcaagggtttcttcagacgcagcattcgtaagagtcacgtttattcttgcaggtactttaaatgcccttttaggcaagttatctttacagatgtttcagtttggcacgcaaaaagtaagagaagaaaattcagagttttcgtatatctgtaagtctataaatacaatctctaaactgcggtacaagtaagaacgtgtgggtatgtacacaggatgtattcacataggtgttcttttttatgaaacattttagacttacagaaggtatataaaaaatccacctacctaccacccagcttagaccaatatagttgaagcctttaatggacacctcctctgtcactttttctccctcgtctcctagaggtaactaccattgccatttcatgttatcttttccttgtgtttctttattattttaccacatgttcatatacctctaaacattttaaaatctgcatttaaaaggttttttaatatgagtatttttcttcatgtttattttttaagtgccattacatcctaggtctaaaaacaaaattatgaaagtgcagatgattttggtagtttgttgatatcaatgagtgaaatttaattttcagtcctaaaatttagaatgtatttctcatgccatattttttgtcattaaatttaaatgttttgtcagaagcttatttaactatattatatttgtcacgcatttccagtaggctgttttcttgggttttttttttttgattaatacctagtcaacatcataacacgatttaagtatacatattgcatcttgattcatctgtatgactgtccttgaatgcagattacatttagattgaatataggctattaacaaaaatggttaaatttaacataaaaataactatgttggttctgtcaataaaaggtacgtgtagaattatgttcttttaagaacagattggacatttgggaagaggttaactttctcaaagtcttgccatgtgatttcctagggtgcaatacaagttaatatataactccccaaatatctgtctagttctctggtaattctttagtaatttttccaagatagtttgaagcaggttaagagaaatataaattgcccactttaaaaactttctaggtaaacaaaaaaaagtgtatttagataagttttgcctttatttacattaaaactctaaaggtaaaaggtagatcaatgtccttcattccctcatcaaaaatagttttgtatgaatgtttctaaactaaaacaaatacagaataacctgtaaaccataccttctggagtcaggtgctctgttaaaattgaatgtgtgtgtgtgtgtgtgtgtgtgtgtgtgtgtaaaatgatgatccaaacaactaaatcctacaacttgtgagaatcagagaatcacaaaggctatgaggacttctgtcctttctttatgggaagagtggaaaagggatgctctcagagcagcttttagaggtttaaaaaatattctaacaacagatagagtttaactcctgcaccttcctattaagaatgctactgccaacctagctttctttacatattttagtattcagcaaatgttatgatttttcatttggaaaatggttagtatattgatggaagtttaagggcatggagactttttgaagctcaggttgtgctggtctcaaatgtatctatttccttagattacaaagttccatttctactgtaactgctccatcaaactgaggttgggatttccttcaaaagcacttttaattgctgtttcaatacttttcatgttatgtttttcacattatgtacaatttgtatgtgtactctattagattataatttccttgagtggaggaaacaagtagcattaatctgtttaatccctacaccaggatcttgtatgttgtaggtgcttaataatatgtgtattcaatttttgttattaatttaatgttaattgaatgcattctccttgtgtttttgtcaatctggtcctctctcctgagtctcatcagccatttgttcccaaatgggcaatgccttgttctcactctgaaagcacatttctcttccagctcaatttgttgatgataggctttgcttctcattcaattttaagtggacaccgatagtttttagaagaagtacattttataggtcacaaaatatatgtctttattcttatcattaatcatcaactataaataaacaggtacatatcaatatgtatggataatttttgccagaattttgaagaaatgttagcgtttactgtatgcttaatatttgcccccaactatttgaagtgcattcacacaacaaccttttgtgcaagtccttctctttattttacaattgtaaattaatgttacttaacacccccaagttctgctgagagtcaatggtggaatcaagcttagatttaatttcagagactgtactcttttttatgtgtttgtttgtttgtttggttaagtatacaagtcagttttttagtgtatccacagagtggtgcaacaatcactacagtcaaatttgaccattttcatcaccttataaagaaacctttagtagttactcccccatttcctcccaactccctccccaacaatatgaggcaactatgaatctattttctgtttctacagatttgccttttcaggacattttgtataaacaaaatcatacgatatatgatctcttgtgacttacttcttttgtttagaatagaataggctgccaaggtttatccctgttatagcatttatcagtacttcattcttatttactgacaaataataatattccactgtgcagtcatgccacattttgtttttctattatcagttgataggcatttggatatatctccacttttgggctatgatgaataatgctgctgtgtacatttatgaagaagtttttatgtgtacatatgtttcatttctctgcatacagacctagcatggcatcgctgggttatactataactttatgtttagctttttaagacagtgctaaactgtcttccaaagcagctgcatcatttaacattttaaccagcagtgtatgagggctccaatttttccacatcctcaccaacatttgttttttctttattttgtttacctgtgtgtaaagtcttaccccatgatgccaactgtactctcaatgttgtcctcaatgacctcttaatagataatttgccatttagggtaaacttcagtgggctgtggggtacacttaaaattaatagaagaatatttgaaaagagaaaagcatgaaaatacagggccatgaagttctgacaatagcctccttcatactgaaatcatttagcaataagcaacaaaaacttgaatgccaaagatattcaaaactaggtttggctttcatgactcatgataaaagtggttatgcacagcagccaaaatgaagatagtcattcagttttattttactataaagactaagtgagaggtgaggctcgcgttttcacgcacatgctgattgagagactggaaaggtcatagctgattgttcctataccttctttttatcgaaccaaatttgacaatacatatttaaaatccatttgtctgtttatttgcttcttttgtaaattatagttttctgcaaactgatatatctttatgttataggttcagtcggcaatgtgttgttgacaaggacaaaaggaatcaatgtagatattgtcgattaagaaagtgttttagagcgggaatgaaaaaagaaggtaataataatgatgatgataattaacattattgatgaaaagtgataaacatacacacacattctcattgattagtataactttttacatgagttctaattttcctcaatataataaggaggaatctatgattcctcaagttaaagaatttagcccaaggacatccagttattgagtggtatagccagtatttatctggtgactacctgattatggatatcattctctccaccattacattgtccaaggcaacaaaattattgactaaatggtataccaatattctgttagtgggttgaaattacagatttttttttttttttttgagatggagtctcgctctgtcaaccaggctggagtgcagagtggcatgatcatggctcactgcaacctaccaggttcaagcaattctcctgcctcagcctctccagtagctgggactacaggtgcgcatcatcacgcctggctaatttttgtatttttagtagaaccagagtttcaccatgttagccaggctggtcttgaactcctgacctcaagtaatccacccctctcagcctcccaaagggctgggattacaggcttgagccaccacacctgacacaaatgtattttttgttgttgttgttctcaataacaactgaatatcttttttcttttgatgaacattgaatgaacatctacttttcatgcattcatttatttactaaatacttgttgaacactgcaattttccaaacactgttctaggtgctaaagcttcaatagtgaacatagcagacaaaataatcttccctttcaggaagcttgtattatatcgagggaccgagacaagagactagatgtgctattttagtgtgtactaatttcatcttgaatatattaagtaatctgattatattctcctacattttaaatatgattaatttagaaacaaatgtattgaacacattgtaaacatgtgacagtgtgtaacagctacaaaattttatacttgtcagttttgctgtttggtcatgcctatcatatacaaagagatgtttttcacaactatttcacaaactaaaataatcaaatgaaaccactatactaaagaagtgtaaaatatatgaagcccatctttaacatagttagatttttctttgccattcaatattttaaggatacagaaataccattagttttgctcaggttggtagtgtcgaagacaacaaaaaataaagttcacaaaattaaaggagaagcactttctcatttaaaaagtgatttatttctaatttcataggaagctctatttggcagtttatgggactaattacacacttggtcaattgccttcctccatttttacttgaactccatgtttatccccacaaaagtgtaagcaaataacaatcctatgtttcctttatgagttttacaatttgtgaaatacaattatgttttaaaataggtaaattttatcttttgttcataaaagaatgtgttattttcttaaataaactggaaagtaatttcaagttttaaagttgatatatttctcttttttacactaacagcatagtagcaagattaattagatggaaacaaatagaagcatagttttatgtcaaaaatgatagcactgagattataaatgtttacaatatcttttagcatttttctaaagaataatcatgtaagtgaaattcataaacgcttagctaacatcttaattttttatctctgcatatgcatttccaaataagtcagtttaggttaaaaatcaataacaatttctgtaaaacaaaaagagcaagctaccagtaagtatgattttaaaataaaatattactgattcactccaacttacaaaaactcactctttcttttttttttttttcacaaagaagtttctcagaatgcttctgggtagttgtttttttttaattattattattattatactttaagttttagggtacatgtgcacaacatgcaggctagttacatatgtatacatgtgccatgctggtgtgctgcacccattaactcatcatttagcattaggtatatctcctaatgctatccctcccctctccccctaccccacaacagtccccagagtgtgatgttccccttcctatgtccatgtgttctcattgttcaattcccatctatgagtgagaacatgtgatgtttggttttttgtccttgtgatagtttactgagaatgatgatttccaatttcatccatgtccctacaaaggacatgaactcatcattttttatggctgcatagtattccatggtgtatatgtgccacatttactatgacaaacccacagacaactcactctttcttaaaagcaaaaagtcctgtaattcctcctttaacttaatggagtggatatttaatagtaagttttaggtctctagaaattggtggatttctttaacaaaagcatacttgcagaaaaaaaatgatattttaatgccttgttgctccagcagaacaaattacagccttaaccgaaataatttaggggctacattccttgtttcccttctctttggttaatgaaagataatttcacctctaaagttttgaaattcaactttgatatctattttattctctctctctctctttttttttaattttattttgagatggagtctcactctgtcactcaggctggtgtgcagtggtgcgatcttggctcactctgaccttcgcctcttgggttcaagtgattctcctgcctcagcctcccaagtagctgggactacaagcgtgtgccaccacgcctggctaatttttgtatttttagtagagacgaggtttcaccatgttggccaggttggtctcgtacttttgacctcagcctcgcaaagtgctgggattacagacttgaaccacacttggcctgattttattctctctctggtaaacatgtgagttaatattttccctgtcactcttccttatatttaaaaatgcagttttcagtaagggatttggggaattacattactctttttttttttttaaccctgaagtaaagaagcagatctagctttctcttagaaacctgtataatatataggatttcttcatctttccaaaatgctgatattcaaacctcaattttctcaggagagactgctccatggtacatcttttgctttattaatgttggtaaactgtcccatggacagtgttttataagagatcataatattgcaatcctaaaatcatcataactaagtttactttccatttttgctcgtgttttatagagaaaagaaaatggaagtttcaaaatctatgactcatattttctgatagtgaatacactcttatctttgacctggtcaatcttataggcaatgctcttcctctagttatcttatagttttattaactttgagagaatagaaaaccaccctattaaaaatacagcgtggcggaactggctgacccaacactttctaacacgcatgctgtcatgaagtctcaaacagcattgttttatgagctctagtgacaaacctgactattgctatttttgaaagtagtggagaatgaaaatatctttcttccaaggtcttttagaaagactttttctcactttttttacttaaaaaaaaaactccttaaaatctatattctaacatacactaaagagaagtgctcaataaatactgtgttttttccccctagctgtacaaaatgaacgtgacagaataagcaccagaagaagcacatttgatggcagcaacatcccctccattaacacactggcacaagctgaagttcggtctcgccaggtacctgtggcacggcagcatcaaaccctatttaataaaatcaaatgtccatgtaggcatcatgctaaaataatctaagttttttcaaaggtgctcattactaaaataagttacatctacacacaattaagagttttactttgaaagtttgagtgggactgctgacttaattttgactgttcttgaacaagactagttttaaatggaaaaataaaacaaatttcagtctaagattgttttttaaaaagtttgcttataagtttgattaaaaataatgaatagcacaaagctctgtaggcagtattttattttattgatggaatctgtacaaccagctaccacaacttttggggagtttggttgatatttgttatcagagcttctttccttgaaaatgacttctggatctttgggaactgctttggaagcagacatttaaatgaagagtcagaattcagaaaacacagaagagagaaaactttattattttaaatttctcaaataacagttctacagttaaaaaaataagtcattagttatatacataaaaataaattatttagtgttgtataaagaaatccttaaatcaaacttactttagcattgcccttattagaaatgttaatattatttttctattataaagcagattataaaattgccaagtagttaatcaggtcctataatgagtcagtgcaactactttcatttttgataacacaagggtaatatgatgaggttaacatcaccgttatcattattacttgaagattgcttgatgggcaataaagcttttagagaatgacctaaaggggagctatgagaaaatattcaaatacagataaagatacactcacacgcatgttcaaaaataagtttataaaaacttttagactgtgttttctttcagcagaaaagctttattacttatatttttatatagtctaaaattacaaatttacaaatttacaaatcttacaaatttattatatgttaagctcttcaacattgctgagtcacacattggttttttaatttaattttgatgggcttccttttaatgcagcgagacaaatagttcttgcttcttgtctccccaactgggtaaacgttatgaaaacattttcttcataaacttccacaaattaaagaaaatatcacctttaattcaaaataaaatcaaagagcatattacatatggatactatctatctatttttatagccattttgaattgtgaaattcctcaaaagttggggtaaaacttagtgtacagatttgaccactaacataagatactgttcccagaggatggtgctatatatatgaaatgtttttaaattaacttgtaaacttataggtattttatttttcaatttaaatcagtatttcatttttcaatttaaaatgtttagtatttgtcaagatactgtaacaacaatagtgcctacttctatggcctttacttatcatagtcaaaagaaaaaaaggggaatgttggccatctattattttaaatgataatataatgcttttcttaatactagatctcagtctcaagccctgggtcaagcactgacataaacgttaagaaaattgcaagtattggtgatgtctgtgaatctatgaaacagcagctcttagtcttggtggaatgggctaaatatattcctgccttctgtgaattaccattggatgatcaggtacacatttaaaactttataaatgctttaaaaatgcttcttgaactttgctaagtttatgttctttccatattatttgtaatgcatatgctatattactgtatttggcaaaagataaattaggaggaaggattgggtttccttacccattcaccttgttctatcaagaggcacaactgtttgacttctattttaggggtgtagcaaatttattgattggacaagaactgaacaaaacactcctctgcccttttggaattttaaaagggtcatgtgagggagaaaggtagatagcatgtaactatcattgtgagacaaagtattagaagagtgaatgtctgtgaagcaaatggtggatgttgtgtattggcgtttactgaagctgctatataaaactcctcagaaataccaggtcactcctagacagaaaccacacaggttgtggtgttgtcttggtgggtacttcatgcaattaacgtaaagttttacctttcatgctgtcaattttattctagaatttattgtataaaagttacatgtctggcaaaaagaaaaacatctgtagaaacatgatcagaaatttatagagaaataaaatttacacaacaaaagatagagtgatcttttactaatacttctattttcatattttgtcatatgcccattaggatattttaataaatacttaggaacttgaatttcctaattgtactataaagataagtattttggtttcagattcattttgaaccgttcttactaagtagggtataattttttgtagatgaaaataattggaaaaattccctttctctcaccttaaattaaccatggtaagtgttataaccagtgtatatttatttttaagagagcgtttcacctggtgacaggaaaaaaaaatacagtgaaatctgaaataattcttaaaatgctctgtaactgccttcctggtgtgagtcacgaatattgacataccataaagatagcatggctcagaaggttatgccagtgaataacgctaaattgctaaaacctaccagtctcaccccaagcaatataagtagggttacgttatttatcagttttatatttttattatcattcttctttagaagttgctgacttatatattcagtgatttaaaaattgggaaattaaaatccagtaaccagtgaaaaacagttttaatttgccaactgattctttaatattaacagtataacatttattaattagccacaaattagtaaatgtctgttatgaataaggcatgggaaattagctttcagttgcactataaattacatcatttcatttaattctctcaggagctcggtgacaggtgttattatctccattttacagtttctaaaactgaaccctagatcagtaaaattcattcaataaattcatcaaatgaatatttattaggagattactgttcagttttaggaactgtgggtatttagcagtaaaaatacagatttcttcactattctcataaatgtacactctatttgagaaaggtggataacttaaaaaatgcaaaaattatgagaaagttcattccaagtggagataagctctataaaatgctataaaatggaataggatgagttgttggagaatggggataaaatgagaagagatactttaaactgaggaccagagaagttattgcctgagaccctgaaagacaaggggccaagcccaggagaatctgagaagaaagcactccagatacaggaacagcatgtccaaggttctgagtcaggcagcaacaatgtgaacaaggggtgttgcaagatgaagtcagagacatgagggctgggaggcaaagcactgacccctctcacgcctcccatcacctgtgaggccatgtttgacgagtttggatttcagtctagggacaataagaaaccattcaaagagttttcagcctggactagggtggtagcaatggagatgaaaagaagtggatcactttggcttgtattttgagaagcagcactagaatttactgcagagttagagaggactcaaaatagtctcttgttttgatgtgaacaagcactttggattacggtgtcatttactagatgaagataatggggaagtgttacattggtaggtgttaaatttgtaatgcttcctatacttcctagtggtgatgcccagcaggtaattgagtgtacgaatgaagctcagttgagagcttactgagaagaataatctagaaagcggcagaacccagacctcccatcttttccttacaagaagtctttgctttgcttttgtttatttagtttattacgtgcaggagattatgttttatatatgttttatcgtttagtactcatgagtacatgatgagattttttttatctctactcccattttgtagatgaaaacaaatgagtaagttcaaacgtactggttaacttacacaaggttaaacaggtagtaagtggccgtgctgggatttgaactctggtctgattctgtttcccttgcaaacagttaacttgtctgctttttttttttttctttctgctgccattgtattgatttgctagatagttttaaaatttttgaaaagtaagttctattgacatgctatgatagaaaactggaaggcttaatgatggcatgtatctatgaatactatagtttgttaaacaaaaagtcccaggcttaaagaacactgtaagttaacaagactcatgtcatcttttaatcattatatattataattaattgttaaactgagaatttttcattaaggtggcactgttgagagctcacgcaggggagcacttactgcttggagctacaaagagatccatgatatataaagatattttgcttttgggtaagttttttttttaatttaagaagaaattatgcatattttattcttgcaatattatacagggtctgttctgtatgtaccaagtatttacagacactggcaaatggtgctgtcacttcacaggtttaatttaattgtgtcctcacttggccttatttttccttgccttgactgtatgtaagttcagagtccatgagacaatcagggagcattaagatttaaaaataaaaaagagatgttgctcaataaacataatattgaggtatgttcaaattatatcagaatgaataattagtaaattatatggctgccttatggagtctcaatgtgttttcatatttcctcagagtctgctttttattttacacactttaaaaaaacatgtttacgtcctatgatcttattgcccatgatagcccacgatatgctacaaaatgatcaagtaaaaaagtattggtggtaatgactgaacaatttcgatagacaggaatgctagaagaggctaaggaaggataataggtgtggggtggtggggtagagaagacataaagaaaagacatttgtcttcattaattgctccaatcccgctaccttacttaacttaaacagttaggttttgagggttgagatccttctgacacttactagctctacctctctctggcatgtgtgaaaatatgactagattattttatttttgtgctagatgttttagccccaaatacaaataaattgaagacaatataacaatatttaatattattgcaggtttactatgtaaatgcactggtctaagtacattacatgtatatgtatatatattctctcatttaatccttgaaatagccctaagggattagtactactattttcagcccattttgcaggtgaagaaatggagacagagaaagtttaccaaaggtcacaaagctagaaaataatatagccaagattctaaaccacataatgtgattgtggagactatgccctgaaatgctattaaatacctctcttgaatttctagtaaacatctagaatactgttcttgttatagacctaaatgcaatatacctagaaaacaaaatgcctactgtatacattctagttctaaattgatttacccagaatagttaggtaagctaacctttcataaagaaagagtgaaactcaaaaaaagatagtaactatgtgaggtgaaatatatgttaatgagttttactatggtaattatttcacaatgtagatacaaattaaaacattacattgggccaggcatggtggctcatgcctgtaatcccagcactttgggagacagaggcaggaggatcacttaaggtcaggagttcgagaccagcctggccaacatggtgaaacctcgtctctactaaaaatacaaaaaattaactgggcgtggtggcgggagcctgtaatcccagctactctggaagctgagacatgagaatcacttgaacctgagcagcagaggttgcagcaagctgagatcgtgccactgcactccagcctgggcgatagagactccatctaaaaacacaaacaaacaaacaaaaaatcacattgtacaccttaaatatatacaattctgtttgcttgtcataactccataaagctggagaaaaaagagtgaggctaccattgaacatgctgttaccctgaggattgtctttgcctgcagtgaaagaatttagaatatttatctttttataaaaccagaaaataacaatttaactgttatttttggaagctataaaaattttcatcatattatagctagagaatttctaagttagaaagatctttagggaataggtggtccagctcgctacccaatctctgaactcccttaaagtcagccttataaagtggttatcccacctctatttaaagaagtcctggaagagaaaacatactatcagaggcaactcatgagaattcacatgctaatttaaaaaaaaaaatcaacctcctttacttaggtgtgttaaaactgtctcaatagtgtatgcctagaatgcctagagtatcaaagtgctgtttttaatccgctgtaaacaagaaagattctttagggtttgtattatagtcattagtgaataaaacgctaatagatgtctgacacagagaaaaactaatcattatatttagattttgtcaaatatcagcatgttattagtctgcacttttgtgttatcaccagtgactgatcccgttaaaatgcatgtgatcacattattaatgttcttggtcctttaagcatgcttaagtttttctagcataactaacaacaccactgagagaggaagtacatcactattccttcaagggtagactattttaaacaccggtttgttaaattttaaacagtgctgacaatttggggagacaggtggttattttgttttgttttgttttgttttctctctcataggaaacaactatgttattcaccgcaacagctgtgaagttgagattagccgtgtggccaatcgtgttctagatgagctggttagaccatttcaagaaatccagattgatgacaatgagtatgcttgtttaaaggcaattgtattttttgatccaggttggttttcaaaattccactagagaattaatataataaaaattgaactacttttcaatattagaatatttattgtctcacactgtaattaggttaaatctgtacactgcctctcttattcctttgttagatgcaaaagggctaagcgatccagtaaaaattaagaacatgaggttccaagtgcagatcggtttggaggactacatcaatgatcggcagtatgactcccgggggaggtttggagagttgcttctgctcctgcccacactgcagagcatcacgtggcaaatgattgagcaaatacagtttgttaaactttttgggatggttaaaattgacaatctacttcaggaaatgctattaggtggtgagtacattgaataatttctactttattgattagaatcacactaaatataagtttgacctactgatttttttgtccatatttaattcatctactgaagttgctgtgatgctcctgaatttttttccttctgctatgacataatgaactcaaggttttacatttagaaaatttgcaagacccatcagagagacaaaaatacttgaacagattcaaacccccattcgtttttttttttgttgttgttttgttttttaagacagagtctcgctcagtcgccaggctggagcacagtggcacaatctcggctcactgcaacctccgactccctaattcaagtgattctcctgcttcagcctccagagtagctgggactacaggcacacaccaccacgcctggctaatttttgtatttttagtagagacggggtttcaccgtgttgattaggatggtcttgatttcctgaccttgtgatctgccagcctcggcctcccaaagtgctgggaatacaggcgtgagccactgcacccagcctgaaacccccattcttattagcctccaccacctctattccacagtccctctgacttaaattttcagatccttccaaacatggcaaagagaaacaaatttcctgattttatgacctcttcaaatatatcatggtttttcatgccctgattcatttaaaacctcaaggatactggaattgcaatacaacctaatacatatatatatatactatcttaaaaatgaacattgtgctcctgaaataattaattgacacaaaatagtagaaagggaaaatgatatttcattgttgcaatacatgtcaggaataagttaagaaatcatttattttgcattccaatctagattaaatttccttgtaaaatcattatatttatttttagttttctggtgcataatttgttcctaatgatatctttctgaaatgaaagttgttcatgctattacagtgatcccaaatactataaacttgaggtaagtgattcttggaattgccttaacaacaggcagcgaacctaatgattccaggaaacggcacacaaggtccattattaatacacagcataatatgatgcaacattaatctagccaatgtacagtgaaagctgacattgttcttaatatgccagtggttctgtcaatttatttttgaattcccaaaaagcacttggcaaaaatagcgatatttaagctgtcaatcaaaacatttgtttcaaggtaaacttgctgttcctgattaaatatcactaacacagcatctttttatcttttgtaggggcttccaatgatggcagtcatctccatcatccaatgcatccacatttgtctcaagacccattaactggacaaactatacttttaggtcccatgtcaacactggttcatgcagaccagatctgtaagtttatagactacttttcaaccaagatatttcttaattacccaagaaaaagtggaattgtgggaaagaatctattagtaaccagaaatggcaaaaacttggtgtaatttcccatctgagactcagcagtagaagactgttattcagcttgtcacttattctccctagacataagtttgcttcctaaaatgaaaatgaaagaaaaatctttctacttcataggtctggggagcacaaaagagtatacaagtagtccttgctttgcatggtagtgtgagaccataaaaacgacaatgcaagctgaaaccatgcaagggaatcttaataatcaatgggaaaattatttcttgcttggcaccttcaaaaacgtttgtcaaaatattaagaactctcttaatgtttatggagactaaagaaatataatctttatacttattttgtagaattcaatacaaaacatttcagttggtacactgtaattaaaacattaggaatattgacaatcgaagggttttatttctctataaaaaaaaattgtgaaatgcagtttgaccagttcttgtcaccttctgaaacttacattaggaagtgaggattttttctatgccctgatgagttttactcgttgggaagtttggatcagctttcaacattttatcccttgcattctcaatgtcatggcatgtttctgagaattcatttaatgtgaaattttcttgccggtttcacttattttgggacaccttctcccctttcgacacatccagctttctcatttatgtggacacgttttccttcgctgggttcttggctgcatatttagagactcaaacaacagcagcggcaacattcccatggtcagctacttcttctgtgactgcatttatgttttatttgtatgtcacttccagcattatcactttttattcctttctgcacttccactgttgttggtcaattctaattcaattattcaattttgtaaaatgtgatgtgaatttaccactaggaaacaaggaggcaacacagccaccgtatgcagtttgttttccatgcctgaactgaatagaagatgctcaatgaccaatcatggacagactaaaagttgtgacatgatcagtcactgatcataaagcacatctgttatttaggtagctgtttgcagactgaagagttggcagtggggtctgtatttatgaaattgctcactcttaattgtgagttaccgtggtaactgaaacttgaaccatgttgttgccagactggtggtgtttaactaagccttggtaaccagaattcattcacatcagaattgtgcagtgagggctgcttatgaaaactccttggaatgcaaatgaccatataaatactatagagattgttagtagctaagttaatctattattgtagctttcatgctaattctattttttctaagctactctggtgatacaaatctctaattatttgattaaatatctagattaactgattaattgcttctgaatttactctaattaatcccagatttacctttgatctattgcctctgaacaccaaacctactactaactcactgagatgacttgagttattgtgatgtaactattatgcatacacttattgcctactgaatttacaatagtctttaatagctagctacagcatttttttttcttccaaatgttgtatgcaatgcaacaacaatttaccagtaccacctgacttctaggcattggtagggaacgtagaagccatgggactgcgtgctaccatgccatcttttagatacaagcacaggtagatctttgtgtaaatagtatctgaaaccaaaattatttgaatatatgagagagagaaagaaatgaaattgttaggaaaaaatataaattttagaaaaatatggcataatcttggatttccaatgtacttgaaagacattatttgggaccatccttgcagaatagatcttaccattttcatttaacagataatcaatagcagaaagagaggagcaagcctaataccaaactagagcgtttatggagttgtgtctcttaaagatcagttattcataaactcacaaaataaaacacattaacaacacaataaacattgtaggaatcaactgacaagagagttggacagttctgctggtggttgaatactttttaagggctagtattatagtattttaaaaacatatttgctgaccctagtcttttaaaaatcacattgttactttcatttttattcttgttctttccacatactatttgtgggatttgtttgcaaaagaaaacttggctttactatgctcatttgaaataatttatattttatgcaaagcaggatattaaacacaaccaaaatttaaattcatgcatattttcttggtcttttagagaaggctactgcagtcttagatctggtctaaatagccagaaataattgtaaaagcagattttgatattgatttgtcatttaaactgcacttaaaaattttgcttctaagtaattgctaatccatacttaacaataatataaagctaatgtattaatgaacaccaggtaaaaggagactgttcttgttttgtatataatgttttaaaactgttgagacataagctataaagtttacaaagcctcagcctgatcatcaaacattttctgttagttctgtttactatgtggaataatacaataacaataagcgtgagtactaaaatatttcaagtttctaaaaattacagaataactcctggattattttataatatggttagattttacaatagaaagaactactattctagacaatgaagttttgaaactgtaactttttacattcaattcaattttttatattcagttactttatattcaattactcaggcttgctctttgcatcaaaggggatgcgacaggcaagctcgattgtaatagaataattttgaagcaaaaaaaaaaaagccagtatttttcagatgcttttgactacaacttagatttcagaacatttataaagtatcttaaccttaattttttatgtcatctaatatgtctgaattagtggaatccaaaccaaatatatttttattttatgtgaattttgattataaaaaatataaacattgttttctaatatttgagaaaactgtccttctgttaattcttttcactgcctttttttcctgctaggtttgttagagaatcaaatgcttataaatgctattaggaaaggcagaaaacaccttaaagtaactatgaaaaaaattttttaacatgacctctttctatttaatgttatttggaaagtaaggtgagagtactctctaacagtacgtcatgggccaataatgcattctacaaatcactattctgtgtaggatattttaaaaacatttccaaattacgctaatgtgtattggtgttatgtagggtttaatggggtgaggaagactgactgccaccattagactcaattctctgattctttttcagcaactcctgaaaccccactcccttccccaccacaaggctctgggcaagaacagtacaaaatagctgcaaaccaagcatcagtcatttcacaccagcatctctccaaacaaaagcaattgtgaaaatgtgtttacttcagaacggcactacataaatgtgaaaagttgttgatcttgaaatatctcaggatagcacttttggcaaactcttagccaaggcttcttcattggtgctgttataagatggtgtcctattttcttgtttatacgttcattctgtttgttattgctactatgtaaaactttcacatgcaaccaatgtatatctgagtttgaagatgtttatatagggtattttttccaactgcccctgcatt

SEQ ID NO: 500 - DNA, 1604 bp, Homo Sapiens
ccaatactggacatggacatggcaaattacagtgaagttttggacccaacttacacaactttggagtttgaaactatgcagattctatataattcaaatgatagttctgccccagagacaagtatgaataccacagacaacggtgtcaactgtctgtgtgctatctgtggggacagagcaacaggaaaacactatggggcatccagctgtgatgggtgcaagggtttcttcagacgcagcattcgtaagagtcacgtttattcttgcaggttcagtcggcaatgtgttgttgacaaggacaaaaggaatcaatgtagatattgtcgattaagaaagtgttttagagcgggaatgaaaaaagaagctgtacaaaatgaacgtgacagaataagcaccagaagaagcacatttgatggcagcaacatcccctccattaacacactggcacaagctgaagttcggtctcgccagatctcagtctcaagccctgggtcaagcactgacataaacgttaagaaaattgcaagtattggtgatgtctgtgaatctatgaaacagcagctcttagtcttggtggaatgggctaaatatattcctgccttctgtgaattaccattggatgatcaggtggcactgttgagagctcacgcaggggagcacttactgcttggagctacaaagagatccatgatatataaagatattttgcttttgggaaacaactatgttattcaccgcaacagctgtgaagttgagattagccgtgtggccaatcgtgttctagatgagctggttagaccatttcaagaaatccagattgatgacaatgagtatgcttgtttaaaggcaattgtattttttgatccagatgcaaaagggctaagcgatccagtaaaaattaagaacatgaggttccaagtgcagatcggtttggaggactacatcaatgatcggcagtatgactcccgggggaggtttggagagttgcttctgctcctgcccacactgcagagcatcacgtggcaaatgattgagcaaatacagtttgttaaactttttgggatggttaaaattgacaatctacttcaggaaatgctattaggtggggcttccaatgatggcagtcatctccatcatccaatgcatccacatttgtctcaagacccattaactggacaaactatacttttaggtcccatgtcaacactggttcatgcagaccagatctcaactcctgaaaccccactcccttccccaccacaaggctctgggcaagaacagtacaaaatagctgcaaaccaagcatcagtcatttcacaccagcatctctccaaacaaaagcaattgtgaaaatgtgtttacttcagaacggcactacataaatgtgaaaagttgttgatcttgaaatatctcaggatagcacttttggcaaactcttagccaaggcttcttcattggtgctgttataagatggtgtcctattttcttgtttatacgttcattctgtttgttattgctactatgtaaaactttcacatgcaaccaatgtatatctgagtttgaagatgtttatatagggtattttttccaactgcccctgcatt

SEQ ID NO: 501 - protein, 445 aa, Homo Sapiens [sequence omitted]

SEQ ID NO: 502 - DNA, 1753 bp, Homo Sapiens
gaggagcctcggttcccctcgggcggctgaaggaggggctgagcctcaggacccctaggccaggccgtgttgaaagcagataccccgaggcctcgcccagcctgcgctggagggaagaaggcgctggaggagcaccagcgaaagcagccagtctgagatattgacactacagaaaaaactgacagcttactccttgtattgattctactcttctctacaaatatagactccgttccctaccacagccttatagttctgccccagagacaagtatgaataccacagacaacggtgtcaactgtctgtgtgctatctgtggggacagagcaacaggaaaacactatggggcatccagctgtgatgggtgcaagggtttcttcagacgcagcattcgtaagagtcacgtttattcttgcaggttcagtcggcaatgtgttgttgacaaggacaaaaggaatcaatgtagatattgtcgattaagaaagtgttttagagcgggaatgaaaaaagaagctgtacaaaatgaacgtgacagaataagcaccagaagaagcacatttgatggcagcaacatcccctccattaacacactggcacaagctgaagttcggtctcgccagatctcagtctcaagccctgggtcaagcactgacataaacgttaagaaaattgcaagtattggtgatgtctgtgaatctatgaaacagcagctcttagtcttggtggaatgggctaaatatattcctgccttctgtgaattaccattggatgatcaggtggcactgttgagagctcacgcaggggagcacttactgcttggagctacaaagagatccatgatatataaagatattttgcttttgggaaacaactatgttattcaccgcaacagctgtgaagttgagattagccgtgtggccaatcgtgttctagatgagctggttagaccatttcaagaaatccagattgatgacaatgagtatgcttgtttaaaggcaattgtattttttgatccagatgcaaaagggctaagcgatccagtaaaaattaagaacatgaggttccaagtgcagatcggtttggaggactacatcaatgatcggcagtatgactcccgggggaggtttggagagttgcttctgctcctgcccacactgcagagcatcacgtggcaaatgattgagcaaatacagtttgttaaactttttgggatggttaaaattgacaatctacttcaggaaatgctattaggtggggcttccaatgatggcagtcatctccatcatccaatgcatccacatttgtctcaagacccattaactggacaaactatacttttaggtcccatgtcaacactggttcatgcagaccagatctcaactcctgaaaccccactcccttccccaccacaaggctctgggcaagaacagtacaaaatagctgcaaaccaagcatcagtcatttcacaccagcatctctccaaacaaaagcaattgtgaaaatgtgtttacttcagaacggcactacataaatgtgaaaagttgttgatcttgaaatatctcaggatagcacttttggcaaactcttagccaaggcttcttcattggtgctgttataagatggtgtcctattttcttgtttatacgttcattctgtttgttattgctactatgtaaaactttcacatgcaaccaatgtatatctgagtttgaagatgtttatatagggtattttttccaactgcccctgcatt

SEQ ID NO: 503 - protein, 408 aa, Homo Sapiens [sequence omitted]

SEQ ID NO: 504 - DNA, 21018 bp, Mus Musculus
gggcgccctgccacaggtccacagtgtccctgccacaggctctccatcgaggaccatggcgaggctgagctgggggtacggcgagcacaacggtgagcgcgggcttccagagggggctgatgggggcttgagggagctctgagccccgtgggggggttgggggtcagggcctggtccccgccggctctctccagagtggacggcggcattcattcaacttcactggaaaagctcactgctgtcccgagaaagcttaagaggtcagaagtcagatgacacatttgtaaggaaacaaggacaactgagccgcgagagctcccagatcactaagtcacgggacgccttccaggcgctgttggagcaatcttggtaacttgtaatttgcatactgacttgaagttaacttggggcttgttcttcagtcttactttcctaccgtacccatcctttcagagaccaaggtttagcaaacgattatagaaattataatatggtgttaaatatatttattgataagcatggcaacttttcttcatcgcctaagtgtattagggataagacattcttcttgttcatcgtttgaactgattgcttcaattaattactcaaaagaattgcaaagaaaaactgggaaagcactgatagtcttcaaaatggagtttgtggataataatatcaaaaacttaaattagcatatacgttattggataatattctatagtacatttaatgaaagtttacggaaagttttcccttcttttattttattttccccctttttgtgttttgagacgaatcttactctgtagcttagtctgggcagaacttgtggtcatcctcttttcttggatggaaaaaaaaaactcgtttcttattgcagcttatttgaggtcgtgatgacattaatgttatttttaaaatgacatcagatgaagtttagatttttatgaatgacatttataatttagatgaatttcttaagccaaaatagcaatcttatgtttcattaccttctaatttgtgtgtttgaaagacaatctttacacatttcagttttgtctctgaaatcattttgtttgttgttatttggcagttattaggtgccagtagtggtaccctctctgtggttagggagaaggttgtgttagccagtaggtactgattgtacccgaataggtacccgaataagtattggtttcaataaaattctccagaaaatttaaaatttcaacttagaaagggcattataatgaggagttgttttacatcttgttcattttttaaatcttaaaaaagatttattctttttttaaaaaaatatgtttatgaatttttgacttgtatgttgtggaagttagaagagggcattagatcaacaaggactgctgctggttttagcctccatgtgggccgggaaatcgaacccaggtgctcggcaagagtatcaagtgttctaactgctggaccttctccccagtccccagtttacattctagctaggagttgcagaaccattcttctcgcagaaacagtggttttcagaggaccacaccttgaagttagattatgagattatgttggaagaattcggttgggatgtactgggaactgaccaagcatttttttctttttctttttcttgttcagtcattgaaaatacagtgactgaacagctggaaagaacttaagctgagcctggcagtgataaaatggaatgggaattggagctctggacaggacagggtgcctgttcctaagcagtttgtttcttcttccgctaacctctgatcattttataggtttaggccgtgtgacatcaccaaacatcatataacactatggatattcaaaaattcctcaagccactgaggcatgtacctttcacttaagaaccatggttaagtgaatttaaagtccagtgtggtaggaaacatacaaaggtgggtctatttaagaggcccgatattgcaagtgaatagataaaactggctatccatcccagtggctttattttgggtagatttgacttctctaagaacaggcctggttgagaagggttagggattgatgacggaagggcttaggaagagaaagcagccccttatctgttgcaaaaatgtttgcatgttgtgactcctgcattgcatgtttgaaatctggtgctcattacgtagaataactcgtatgtggtggtcatgacagaaagattttctatattaaataagaagacaaaattgtaagcagaaagatacacacagcaagacgagaaataatctcataatcctacagtgtcttctgaggattttaaatgcaaaatcgccatgacccatagtatctgattcacaggatacctttgaagcagggtatattgtcatttgttcatggtgtggcttttttccagaaaccaatgtgagcaacaatgttatattttttgacagggcatagccattttgtttgaattattctctgtgtaagatttgtgtgtgtgtgtgtgttgggtagatgagttgcatataacaggtacctcaggttagctgagctgagcagaggggcattagaggctatccgtcagtgctataactactagcagaaatagcaggcagtgtctgctcttcctctgcttaaacttcttggcctctggagcagccaaggaacattcttggttttgagatggaatttctttgtttgcaacaatgaattgtacttctgttcttgtttggtaggtaggtaactttgagaagcactgtatgaaatgtaattattctttcacctataatgtacatctttaattctgataacaatttaaagcaaacacagtgctttccataaccacaaaacactagtcatggttaaaataggagcagagtcctgaggatcatacttttactaatttttaatttttccccatgatgtggatgatgtggctgtgggtatggatgttttattgtgtgcagaagccagatggaccttggttgtcttcccctctgttctctatcaccttcttaattgtttctctctgagcctggagttcagagagtcagacttagtgtaactagccagctaatgtggaactccttaagtctcctcctaaatgctggacttcaagtgagctgccacacccacctggcattcctatggataatgaggatccaaactctcaccttcacatttgtgctgcacttcctttatccatgaagtggagtccccagcctgctgctaccagttttaatttgctgaatgaagaacttacttagtcctctccttttggtcttctcaatttcaggtcccattcactggaatgaattgttccctattgctgatggtgatcagcagtctccaattgagattaaaaccaaagaagtgaaatacgactcctcactccgacctctcagtatcaagtatgatcctgcctcagctaaaatcatcagcaatagtggccattccttcaacgttgactttgacgacacggaggacaaatcaggttggctctgtttgtttattagttgttgtaagacgttggatggttagatttactctcctgtttttcactctgtaaatttcaaaattgaagcatatttatcatgtgaattcaagtgttatatatttgaaacttaagataatattaccatgaaataatagagaaaatttgtagaaaaaagtatgctgggtgatattttaaaattggttttaggttattattacttaatgatgtaaatattgaagtttaatagttttttataaataattttagtcttttcatgaaaactttaaaatttctttagatttgtttatttttatctgtatgaatgtgtactgtgtggctgtctaaggttatggtggctgtaagcccagtgtgggtactgggaatcaaacctaggtcctctgtacaaaaacacaaaatactcttaatattaactgctaagccatttctctagtcctgtttttggaaattgtttagttataactaaattgctaattattgtaaatgtaaagttgatgagatatttgctttctaaatcttttttgtgcttgcagtcataatatgtatgtgtagaaaacaagacacacagaaatgtaggataaaaattaaggctgtccctacagattataattatgttagcagcaatacattgtttttcaggatttaaatttgatgccacacgtgtatacacatgcacaccatattattttacatttttctcttatgttgtatttaggctggtactatattactctaaaaatgtttcctatgcaaaatatttcatgcatagttttcattaaaatgcatacctcttgttaataaatgaaatatatcagccactcttttatcataatgtatatattatcatcataataatggacatttaagaaggaagaaaagtagatatttaattgaaaaaagaagtatttaaaacatctatccttatttatatttttcattagttgtaataaaaaataaatttcacttgttcatgggtcatgtctttcacaatggaaaggtggactcacaaattaaaatgttaattcactttctcagtctattacctaaagggaaaataaaataccatttacttaaaatgaatatttgaatactggaatactctttgagcctatctgctgccaattttaaaaatgtagctgaatgaaattatgtgcaaacttttcttgtccattgtgtgtttgcaagcatctagccagtgaatttatggggcctagtgtaggttctaggggttggactcaggttattagggctgcctggcaatactctcccccccgcccccagtcatgccattggctccccattaagaatttatatgatttaatcattttcttcatgaacttatacttgatgtcataagatcctgcttttataaaagcattgttgttagtaaaaattgtaagtgtatacagatctcttcttcacatttgttagataaccacactgaaatatttctctaggcctgtgcaaaataaataaagaaaaatcaatgacgtttctttttctgtgaagcagagagaaaacctgccttattagatgtatttaacttaatttccttcaggctttcaaatttgtgagtctgttagtagatgtatatgtagtgtacaaaagagtttggaaaagtagcccaaagcttctaaatattaagttgctaccacccacatttgttacaggatacttttataatatttaaacataaaaggtctaatgctactcacatcaaatattaaagtgttgacattattcttcaaaaccattttctttatgaatgttagtatttttattgggggaaaaattctaatttaatttgttctgtagtaatctctcattcttttcctccctccttccctatgccctcatttccctgtatctcctgccccttcccctccctccctttctctctcctccactctttaactcctttgagacagggttcctcactgaacctggatccaggccggtagcctggaagcccttgaaattctcctgttctcaccctgcccacagcactggggctactggcctcgtggccacatctagatgatttttatttttgttgcttgtttgttctgagtcagagttaccctgtgaagtccaggctggctgcattaaaggtgggagccaccactcccagccctggtttttgttttaactggcccacatgctttaacagcactgctcgtactcactgagccacctccccagctccaagaagccattcctgaccaaaaattaactgtgaattttatcagtgaacacaccacaaaattgccaccatggtacttgagggttttgcttggctgggccaatgcacacctgcaccttggctaacatggaggcatccactcttcagaacattaatagttcattgaaaggtgacatctaggcacaaaatcctttaggaagactattcactaaatatagaaggggctcttgaggggagacaagatagggatgctctagactcatctcagggaatttcacctgaccctggttcctggtggtctgggatgactccacccagaacttccaccactgcagtttaactgccaggtggcatttcttgacctgttactttagtgatttatttgaaagagtttacttttttggaaattctaagtgaaaggaaataaaagtaggtatgagtttggagagatcattacttgttttgaagaataaaatggagacaatgattaattattcactgatctgtgatggaaagtaaaataaaaattggtcatgtgaaaacacaaaatcactttcattaaaattaaggattgttgcctactactgtggagcacatctgcagtcccttcccttgtgaggtacttatctctctagaggcactaggacctgggagaatggagtggacaaatgaggcagactaaagtctcatggaatagctgaggggagtcacgtgagtaaagcacgtgattacaagcacaagccacacgacatgtggggtgcaagccccccttggaaaagcgagtttttccatacaggcacagagaggatgacagcagcaggcaataacgagtaagctaaagtaaactcgctcctattcactacatctgcaagaagcacaaaaacaaatttcaagaacaattttgtgcttttgaggaaactgagggcaccagtctcttgtcttgttttcttggagttttctcacaagtgctcagacttctcacatgactccattgatgggcaagtcctgacaatgaggctgaagaggaagagtcacaagccagtccgtctaaccaaaaagaaacccacagattggctgtttattgcagatccttagaaacctacatgtttttaagctcactttttcctgacctgatttttcgagaggatccttcaacagtctttttcaaaattaggcatttgcttattctaaactcactgaaatactgacctgtgcagactgaatatgtaacctgtaaaataatccatgctgcttagccagacaaagcctgctaacctaactttaagagtgacctctactgccattattcttggatgcctccctaacaatgtgtggtttttgtatcactttctttctccggagccaacaagcctgagtctcctcccaaagtcaattccacattgattactcaagctctctaatctcctttctatctgcaagggaatgacttttagcccagctcagattttgttatgcaacagcaagaagaaaagcacaatagagcccttgactactttcctttagctgccattccatcctgggtcaatgccagctgtgtaatgaacacattgctggcgtcattcaggggaatcgtgctgaaactgtttaaagacaaatcaaatatcttatccatttattcatcaggtatttgtgcatctcctctgacagttactacgctaggaggtggtgatagcaggattgcagtctctgttttcatacttgcatcctagtaccaggagaagcagtaacagaaccctgtctgtttcacacagtaatacaagaggaggcccgcagactgacctcaatggtggtctcctctttttcactgttcacagagctttgaaaatagccatattttgctatcatgattttgaaaatatttgtgtgtacgtgtgtgtgtgtgtgtgtgtgtgtgtgtgtgtgtgtgtgtacgtgtatgtaccatctgatatgggtgctgagaactgaacttggtcctctggaagagctgcaagtatgcttaactgctgagtcatctctcctaccccacctttatgtattataaagaaatctttcttatataaggtggataggtcttgaaatttaagactctgaagagtaatttaaatatctgttactaagtctgtatctcccttttcttgcacaattctgtggtatgctggagtttagttactattacgcatattcagccagcatacaatgtttcctttccattcctgcctcttcagcagacaagggaactaggcagaaatcgtttagggctctccttccttcgcctccttccccctcccttcctcttcattctttcccctttctttcctccctcattcccttccttccttcctttctttttcttattttttttttttttttttttgcacaggatagcccaaagtcactggccagggtgccaagattataggtgtgtgctaccatgcgtagtttaggaccattttatattaaagtgtttttatgtacttatgacataattttattaccataaacttagacataatatttgctgagggaaaacactaaaatatacttcaccaaagtaaaaaagacatcttggagtttaaaaaaatactttaatttcttcacaaatatagagtctaaggactgaagtcgtgccagtttttatggttatagcaacaatcatgccatggtaggaatgggtagcacatgcccagtgctgttgtttcttctattttcacagcagtctgggggcggggggggggctacatccctcgctcctgtggttaaatgtccaagtggcagcttagaaggtagagtttgtctaagaccaccctgcagtgcctgtttctgatcatccaatctctttggctctcccatgctaacactgaactgtttttgtttttgtttttttaaatttcaatttcttactcagaaactctggcttgcccccagttaaacagggtggattttcagtttgtagaattcgaatcttttctctttgccatctgagggtgcgttgtgattttccaagtatttaatggtggtctctagttcctttttactctttgtatatatgaagttgtatccctgttggcaaagtgaatggcatatctgtaaggacaggaatgtcctgagtggttcagggagaagttctgggttttgatgggatgtataatgtgatttatttattcatttcataactctttaaaatgtgttggatttagttctgcgtggaggtcctctcactgggaactacaggttgcggcagttccatttgcactgggggtcagcagatgatcatggctcagagcatgtggtagacggagtgaggtatgctgcagaggtaagccacgcacacactgcctaatcaatacgggatgccttccatagccccagcagagcctcagctactcaggcatcccactgtaggggacagcttcattaactcagcaggaaagcttcaaacagggtctttcatagccttaaaccaaacctgaaaccttactatttattatacatttaagatgagtagactgagcttaacatgctgtaacatgcctgtgatcccagcatttgggaggcagagacaggaggatcaggactcccaggccagcagcctaggatatatgacaagatgctatctgaccaaacaaagtcaaatgacactaacaccaaaaaataacaagaagtacttgctggagggcgtgggatggaaatcagagactggaaaccattaagttatttatccagctatgaaacattatgatgagtttatacaacccctattttgttacgtgaaacttaatctgttggattttctgaaaggtcagagagaagagaaacatttgcgttatgttagctttgtgtgtatttgatccagacaaataatcagaaataaataaagctcacattctatacatgacagcagtggcacttggataaactgtaagggtacaaactccagattgcatttgcaggtttctaatgcaactctgtgcagtattcacaacactgataaacagcacaaacaatgatcattgtcatgcttactttttgctgacaaggtactcctttttgatataacaacattcattaggagtcctcggcttagtctaatcctctgtgtgaaagacagagtgtgatatacctcattttaataccattaagtagcgctgagctgaactttaccccaaaatgaaagtcacatctcagtgaaaactcttggagtgaaacactcctggcatgtgatttctttctacaagaccgagcgttaccacgacttacatactgtcttcatcttctcacagttttgagatgaggtttgatacacagaatagttctgttgttcagaaaatccagcaaatggaacttcttttctactctgatatgtagctgacctttgaggttgccatccaacatgtttttttggctagttatttcagttttatctaagtgtttttattgcagtacctgctctgttctcaggagagagaggggaaagtgataggcagtctactctctggcagcagcggtagtggtggatctgtgagaaaaatctagactcagagtgcccttccagggaaagggactagtaaggggaagtgctatgcagtaggaatgagttcagcttgctcacagagagaaaagcttttctgtataggaatggtactggtaagagagaaagaggcgtggaccctgtcctgcagagcaaagccctgctctgctttctgttatctaaaacatatctgactgccaagtggagaacacaggccactgtggggcagatgttaaaggagggagacaaagtagatgactatggaagacttgaggtgagcagtgatggtgatttgggcaggaatgtgaaggcactggagagggccaatacatacttggcaggccatatcaacaggacttgcctataccaaggatgccgagctccagcaagctgtgtatacaaaccaggattttaaagaggaagtcatggtgctttatcatagcaacagaaagtaaccagtacaaatatatgtatgcaaatataaagactaggctagtagtccatattgaaaactgtatttcttatggtttgtctatcattgctgtatgttaggtctgaactataatccacaagcccatgtatcaaaggcttctccagggcagtattactgggaggctgatgaactttgagaggagtggcctcaaaggaagtccttaggtcattcccatgtgcttttgatgggatggtaggatcttgccccatcatgggacctttttacttcctggtgatgaggtattcagtctcccaggcactgcacctgtgatatgctactttgccattgaccaaaaagtcagaggcatatactgagaactttcaaactcagagccatttctctttgtaagttaattatctcagaacagatgaaaagctaatatataaatataggagacgcataaatcagatatccacactcgtgatagatttttgtcatagtaattggcagcatgttttgaatatcacaagcattcagcttaaaaatgcttaggtgaaatagtactattatttataaagaactttaccaaaaaggaaaaaaaaaattctgttttgttcttaaacagagtctcacaatgttgctctggatggtctgagactcattgtatagataagggtgacctaaattttgtaacaatctacctggatctgctgatgctcaagtgttggaattacagatgtgtgctactactccgggagggaagaatcttcctctgataattgtgagggctagtttccagtcatccatctgactcgatgttcctgttagtcaggaagtatgcagttgttaatttgtttacttttaacgcaaaaaacaccaatatagaaaagtgataccaatttctcctaaggctatgtgagagagaagagggatttactaaaaacagattttcttgttctggtttctcgtcatatttcaaacagttattatttagccagtagaaggatgtctacacaggagacttccttctctgtatttatatactcatttcatagccagttgtgttcctgacccattgatgccatttctcactaagaaagctatttaaggagttgttgtaactggcacagagccatttggaataacttgagcgctctccctggcccatccccacagtggaacgttctttatctctcctgagccatgggagacttgttttgtcatcatgttttcagggttctttcctcccccaactatctcacaccaacataatacagaacccacctttgtatgtttctgtctggatatcacttcgtatcccttgattatacatggttgttggactgttttatagttttatagttgactatctgtgataattcttatctaaccagaaactcttcatattcgttatgtggagtaagattttgaaggatagagataaaagtatttatttgtatatactagatcatctctgtgactgaggggaaatagagcatgaaaactgagtgagtgcccctttttcaattgccaaacagatacataaggattcttatctgaggtggtccctggtatctttgcttgttacaacatggcccagcctgcaacatttactataggaactaaatcctctaggcctggcatattgccctttggcttctctgtccttctttcaagcggaactgaactggtagtcagtgtgcttactcagccttctctcgtattcctctgtgtttgggatactctagtgttcatggggtctaacaagaaggctttctttgggttttgcaaatttctgcttgtgtgagcaccagctgcttcttttcttgcttggacacctttgcctttttgacccacagcaatcatatttgttcttggcaaaagatctgagtctattcatataaggtagaaaatgtaaactgcctatgcgagtcagctcagtatgaccatgggaatgatgtacccctacattagaacattgcacataaaaacaaactaatgcacatttaccgtatgcaattatcattcaatagtacaaatgatctaataataaaagcatatgactagatctaaaatagtttatcataaggggatgcaaattccccagccacaaaagtgagagactgcaatgaggaacatctagcaggacagtttcaagtgaaaccctgttaccctcctctgctactttagaggaagttgactttctgtagagcccaagcacctaggtgggttctatgggtaactggtatctgagtcacagcgactagtagcccataacccttctggtctcatttcatataagagtagattagggggaataaagtcagtgtctggatgaaggagtccctaggcactttatcattcagcatcacatcagacagttacagcaatattagtagcatttctattttttgtcatgcttatacagatgtttgaattatgttatgtgttttcttttcagctgcatgttgtccactggaattcagacaaatacccgagctttgtagaggcagctcatgagtccgatgggctggctgtcctgggagtatttctacaggtgagaacccactgtttgattttaaatagccatttaactagttttaaatagcaaactagatctgaatatagtactttccccttgaagtgaacactataaagttccatactagtttagggaaagggtcacttttttctgaatttccagttgactatgtgagtagcaactgccacgccagcaagaaagcagcagaaggaacagctgaaatcccaagaagaaacctaggggcttctggttcctgacttccacatggagagctagaacaacagagcattcagtttcatggttcttgtggcacttgtttgcccctgttggcaaatcatctcagaaatcgtggtcacttgtgcgatcagcaagttctgtcagcatgcttgggaacagttccatacagggcgtgcactgtttccatgcctcataatctgtgtgatgttgtaacttgtggaacaggagtggcgctgagaggcaaagactgggaacgatgtgccaagcagaggcagccaggattttacccttgaaatctgggtgctagcaacaggatccaggaatggtgggagaaaatgcttgacttttatggggttttataccttttgggggggggggttgaaaatgttcctattaatgaaaggtgtaaattttatgtatttgtgtatttacaatgcgtatgcttttcagggtggaatgccttgatttggaactttaagaaacttggggctgcaagtaggagatctaaaatttcatggaagagttgagggcagctcagccagtctggttctatatgccacagctggtttaatagtcacttccctaagcagggtttctttcagttaacctgagtcttaaacatggctcagcagttaagagtgcttgctgcttttccgggataccagagttcagaccctagccagattgcttaccagtgtttgtaactccagctccagagaatctgacaccctcttatgttctccttgagcttccacataagctcatacacatgcatgtctgaaacacgtgaagctattactatcagcgttggaactaacctacagtgctattcccataatgctatcttgttcagactcttctggcacaatcaatctgtcaggtagaggagaaccttgttctacattcactgtaggctttgagctgactctggcttttagaaaataatgaaaatgtaaggattgaaatgaaatgcttgttgcttgtttactcctgtaattatgtctgttttgaaactttacacttttagattggggaacacaatcctcaactgcaaaagatcactgatattttggattccataaaggaaaaggtaaaattaactactgtttgttaatgaccaatatttttctactttcctgaattttgagcacttacacagtagacatatcatatcatgcattatttgaagcaagtttcaacttaacagacccagactgcagaaataatttattgccacataccttttcagagttgtgaagagcctgatattatctatagtaatcactaataagtctatgcagatttaagtaccaacataataattttataaaaaaaagaagtaaattataacttacttaaaagactacttatataaaataagattctgtttttttccttgacctgggatctctctccatatttcacactagcctgttactccttctggagcccaggctgagccttgaactcatgaccccctgcctctgcctgttgacttctgggattataggtatatgccatcatatctcactctattgtccttctataaatctatagaatttacaactttatctgttcttttttgagttaaaacagaaatttgttttactaaaatattgatggatgatagtaattatacagtgaatgtgtgtgtgtccgtctgtctatcttatttgtaatctgtagcaattctctttgtttttccagggtaaacaaacacggttcacaaattttgacccgttatgcttgcttccatcatcttgggactactggacataccctggctctctgacagttccacctcttcttgagagtgtcacgtggattgttttaaaacaacctataagtatcagctctcaacaggtatgttcattcttccaagttaattgtgctgctatcagaggaaacttctatgtcatttttaaaacactgtttatatttctgccatattttggagtctgacattttctttcattaattaggtgaatggttagactagataaggttcatgtcctctccctccttttggactttccctccttcctttgttttttttctttctttctatcaggtctttctatgtagcctaggttagccttgaaattgggatctttctgctgtagacccccaggcactgggacgacaggtctgccaccatcgaaggcacatggatttgatccctttttaaattgctcttactgaatcactgctcagaaatgttagatgcttaaactttaagtggtttacaaccccagaggggagtttgagtgtgggatggcaacctcatccctcacttggtgctgtgtgtctttctgctggaggtgggctctataagtttcctctccccattgtcaggcatttcatctaaggtacccaactttgagtcctgagagtttctcacctcatcagtttctcatcaagtaaatcaggtctctggtactttttgggggggtcccccccaacatcctatttcctgaggttgcctgtttccattctttctgctggccctcaggtcttcagtccttttcccccacccaataccatattatgttcccctcttgcaacccccccaccccatcccctttccctctcaagcccctccctctctccctccccccttgtgattgctatcttctccctccctcccaagtgggattgaggcattatcacttgggcccttttgcttgttgacctttttgagttatgtggactgtatattgatattctgtactttttttttggctaatatccacatattagtgagtacatgtcatgcaagtccttttgggtctgagttacctcactcagaatattttgtagttccattcattttaaaaacatttaattctgtaaaaattttacttgtttttattatcctatgtgtgtgtgtgtgtgtgtgtgtgtgtgtgtgtgtgagagagagagagagagagagagagagagagagagagagggagagagagatgtgtctgtgtggccctctatgtatatgataagtgtgtatgtgtgtgtgtgtgtgtgtgtgtgtgtgtgtgtgtgcgtgtgtgtgtgtgtgtgaatgtatgggggtgtatatatgccccactgtgcatgtggatatccaaggacaactttgtggagttggttctctgcttttacctatgtgtgtgttatagggattgaacacatttcatcatagcctttaccatctgagccatagtcccagccctgacatgtttttttcttttcttctttctttctttctttctttctttctttttaaatgggttctttgtgagtttcacatcatgcaccccagttttgctcatctctgtcttctcattgctgcccttcaccttataacccccgacccccaccccaccggaaccccatgagttattagtctagttcaaggtctctggtctcagtgacaccatcactacttaatccccaccaggctcctcctggttattctgcagttgcctgtgtcatggagatcctgcagcttggaaacagcaggcctttttacgaatctcatatgctcatagatgatacagattttgggggtgggctaaccagagacctggatttttgccagggtaggaacagagccactctgtgtgcaggccttcccttatttgcaccaccagggtgaactctccagcactattaaggttaggccactcaatgctgccattggcaagaggcagctctcctgctttcatggcttggcacgaggcaccagcacctatgccttcagagccatctccactgtgctgcccagccaaggtgcccagcccactctcccaaatgctatagtgggcagggctagcttttctgctctcaagtcctcaggtctgctcttctgactattgcaggtgatgagggacaagaggggggaggatattatcaccgtatccatgccaccactgaatggcagatgagggactactggcagggccagctctctgagttttcactcttagggctggctcgcctgcacctccaccaccagggtcagctctgctgtgcagtgcctgctttccccagtgctgcagcaggtgaggggcagggttggatctcctgagctcataatcctttgggtagctttgccaactgccagaggtagtggtggtggtgggcagggggatatcacctatttgcctgtgccggttcaggcagaatagtggcagggttactcacaccctgctctcagggccagctccactgtgctgcctgcatgaggtggagggccatgagtgttgcctccagtgagagatagggccagctcttgagagcacagaatacagtgagggacagttatgtccctgttagaagtctagtggactcagacatgcccctcagtagcaggtaagtctgggacctcaccatggccccagatgacagggctggccctcccaacaggctactcttctctgcccttacgtctccagtttcatctctctccataatgctcaagttgctccatgtttctttctcccacatctgatcaccacatacttgcatattgtagtcatttggggaattagattaaataacatagtgtaaagaactttaagcacagtgtctggatctctgtgttctagaagagagcttattttattagtactcaactttggctccagtggagagttcttaaagatggctgagacaagtgtgacacaaaattacttagaggactttgcaaaaaaaggattttgtcttgctggggctgctattcaaggaaatgaagatcttagtcgttgggcccaggaaaccagcaaagcaggtcacactttgctcagcctccaggctgtacggagatgaacctgccaagaaggggtgggtgctgagtcagccttggtgggaagggggcaagtttcctgcctgaatgagcctgtgcctacgtgagggataaggtatctgagccagccaggtaggtcatgaagccaagagaaactaacctcaacagggcttggcatgttctccctggctgggccaggcaatggggagagtactaaggcttagggctcttagcaaatgtgcaagctggtagaagaaagttctacggaaagatgcaattctgcatgggtgatagagaggtagggatttatgacaagcttccgaggaatctgtgtgtgtgtgtgtgtgtgtgtgtgtgtgtgtttggttgtgtgtctgtgggagcagtgtcttctgagcagctgcattcccaggaccatcacgtggactggagtcatgaccagggttactttagcctcttttgctggatttcaccatgagttcttcctcattcgtcctctgtgttttcagctacaatgatcgtagaacttatgacgaattcataagttgtgatcatttgtctcctcattcccatgtgtgggctctgtgaaaagacatggcagattctcatttttgaaaacaataatcagattctgcatccacaggccatggttgtaaagtgctgtattaatggtgagaaccgctttcttctctgcctccctcttatctgatactgtccaggaaatgaagaaggatggaagcctaactgatatggcctgaggttaggggacttaaaattcatagaaaataaaggctctcaacctgacagtttactaattcctctctatggaaacactgcaaactcaaaagaaacaacagacctcgttctaatatgcagtatatgtatgcttttagagaatttatccaatctctatcactgtagactttgctaaatcttattaaacaatactgaatttccccaaattactagagtattagaaatcaaaattataacagactatgtgaatagtgctttgcagcaactacaagtagtgtataaagttatatttattgatatccaaagatgtttatagtatattatgtagaaaaaggagatatcaaaaatgaggtatatttgagcacatttttgtaataaaatatgtcagatgtatgttgtagagagggggtgtatagaaaacagttctgcaaatcccagtttggactgttcagagcacaacattcttttaaaactttgatcctcaagtgaagaacgtttatatacttaattttggattcattgttatttatatggcaaagagaatctaacagagcaattctttatggtctgtgacctataactttgaatttttacattgcattcgttttagctgctggaagagtaaagactataactctttcatcttttccacgaagttcattaagattggtgtgactttctgtggtaaattaattctcctctaattgtccacagctggccagattccgaagcctcttgtgcacagctgagggagagagtgcggcttttttgttaagcaatcaccgtccaccacagcccttgaagggccgcagagtgagagcatctttctattagcagtcaccagtgggtcaacccaatcggaacacggaggtagcaaatacaacggaactcagacattccaataatggcttttcgagaatttcacgtttgtggattctacttgtccagcacctctggcacggcagagaaaaccagaagtctgaaataacttagcccatcactcctagatttgccccaatgtatgtccaattgctaaatatgggatgtaattaaaatcacaaagtatacctgcttcagccttcctgacaataatgtcagccttaccaacctcagactgtactaaactttatggtgggcttagactgagcctatcccattctagatagtgtttgataaaaactttaaattcactttgaactgatattattcccaaacaagcagttcttacagtcttgataattttctgattaatcaagagtatatatttcctttaatacattttctcagattctcattttatgtactgtaatatagcacataagacaaaacacacacagactaggatagaacaatgtggctactcctgtgattaaagtaacctacagttttagtgaagcattcctcaggctaagaacagctttttaagacactattccacgtaatatattcacccaagaatgttaatgactaccagggtgatgacatagtgtgaggctcatgatattaacgtgattcagaccagcaatgtatacgataccactgcagcagaactgccccgagctggtgaacagcttcctacaaacagagtgggacgctatcctatatctgctgttttttctgtcacccattaaaaagatgaaccacgtcttgcataaatgcctaagccattcattgcattttctaggaagagcttatttcccatttgtacatgttaactaagctgtttcatgattttataagatgccatttgttactaactttagactattctatctggagaggttttcttttgtattcattgaaggaagacaggcaccacattccttttgctttgccattgtaaggtgattctatactcaataaccacacttaagacttgaatatttgttatacttttggtattttgtgagactgtgtccctgggtttcttaagtttaataatttgtttcagatctctctcatcttctaaatgtaaagttaattactgaaaactttcttcatattcttcttaatagaataactttattttga

SEQ ID NO: 505 - DNA, 2041 bp, Mus Musculus
gggcgccctgccacaggtccacagtgtccctgccacaggctctccatcgaggaccatggcgaggctgagctgggggtacggcgagcacaacggtcccattcactggaatgaattgttccctattgctgatggtgatcagcagtctccaattgagattaaaaccaaagaagtgaaatacgactcctcactccgacctctcagtatcaagtatgatcctgcctcagctaaaatcatcagcaatagtggccattccttcaacgttgactttgacgacacggaggacaaatcagttctgcgtggaggtcctctcactgggaactacaggttgcggcagttccatttgcactgggggtcagcagatgatcatggctcagagcatgtggtagacggagtgaggtatgctgcagagctgcatgttgtccactggaattcagacaaatacccgagctttgtagaggcagctcatgagtccgatgggctggctgtcctgggagtatttctacagattggggaacacaatcctcaactgcaaaagatcactgatattttggattccataaaggaaaagggtaaacaaacacggttcacaaattttgacccgttatgcttgcttccatcatcttgggactactggacataccctggctctctgacagttccacctcttcttgagagtgtcacgtggattgttttaaaacaacctataagtatcagctctcaacagctggccagattccgaagcctcttgtgcacagctgagggagagagtgcggcttttttgttaagcaatcaccgtccaccacagcccttgaagggccgcagagtgagagcatctttctattagcagtcaccagtgggtcaacccaatcggaacacggaggtagcaaatacaacggaactcagacattccaataatggcttttcgagaatttcacgtttgtggattctacttgtccagcacctctggcacggcagagaaaaccagaagtctgaaataacttagcccatcactcctagatttgccccaatgtatgtccaattgctaaatatgggatgtaattaaaatcacaaagtatacctgcttcagccttcctgacaataatgtcagccttaccaacctcagactgtactaaactttatggtgggcttagactgagcctatcccattctagatagtgtttgataaaaactttaaattcactttgaactgatattattcccaaacaagcagttcttacagtcttgataattttctgattaatcaagagtatatatttcctttaatacattttctcagattctcattttatgtactgtaatatagcacataagacaaaacacacacagactaggatagaacaatgtggctactcctgtgattaaagtaacctacagttttagtgaagcattcctcaggctaagaacagctttttaagacactattccacgtaatatattcacccaagaatgttaatgactaccagggtgatgacatagtgtgaggctcatgatattaacgtgattcagaccagcaatgtatacgataccactgcagcagaactgccccgagctggtgaacagcttcctacaaacagagtgggacgctatcctatatctgctgttttttctgtcacccattaaaaagatgaaccacgtcttgcataaatgcctaagccattcattgcattttctaggaagagcttatttcccatttgtacatgttaactaagctgtttcatgattttataagatgccatttgttactaactttagactattctatctggagaggttttcttttgtattcattgaaggaagacaggcaccacattccttttgctttgccattgtaaggtgattctatactcaataaccacacttaagacttgaatatttgttatacttttggtattttgtgagactgtgtccctgggtttcttaagtttaataatttgtttcagatctctctcatcttctaaatgtaaagttaattactgaaaactttcttcatattcttcttaatagaataactttattttga

SEQ ID NO: 506 - protein, 262 aa, Mus Musculus
MARLSWGYGEHNGPIHWNELFPIADGDQQSPIEIKTKEVKYDSSLRPLSIKYDPASAKIISNSGHSFNVDFDDTEDKSVLRGGPLTGNYRLRQFHLHWGSADDHGSEHVVDGVRYAAELHVVHWNSDKYPSFVEAAHESDGLAVLGVFLQIGEHNPQLQKITDILDSIKEKGKQTRFTNFDPLCLLPSSWDYWTYPGSLTVPPLLESVTWIVLKQPISISSQQLARFRSLLCTAEGESAAFLLSNHRPPQPLKGRRVRASFY

SEQ ID NO: 507 - DNA, 38510 bp, Homo Sapiens
atgcagcagaataaacaggatccaccacctttctctctaggtcaaattcctggaaatatctggagggtaagaaccagtgaatgaaaagagatggttaatgctttgcagtgaaggaaaagtgactcgcatcagtagattactatgaagctgcaagaggtgagtcacaggctttagcttttcatggtatggtttctgtattcaaataccatgttacttttatgcatgcttttctctcgtgctcttttcagggcccagaaaaaaaagtcaccttggatttccattcatgaatacatacttctgtgacataggaggtgtgaaagaagcatttgctgaatgaaataaaacttcctgaaatgtaaaaataggcaagggtttgtagccatacactaaaaattattgtaaagcactgtcactgttagcatggccaagatatacctagaagaacactttttgtcttcttgtagcactgcttcttggatgtgataggtgctccacaaatatactattaatttaattaagcaaatttgatttagaataatctcctggccaaatgcctagggatcttgaacctgaactaattatagtcacaaagaagggcttgcatttgaaatcttcgagggttaagaatggtcaaatacatgtcacaaagacaataaaaatattccaagggcatgcgtcgtactttttcactctttatgatacttggttaaaatgcaagtaatggttaaaatagaggaactgtgaaatatttagcaggtgcatatttaaaactcagaaagttggcaaaggcaaagaaggcagtgtgctattaaatttaaaaaaatgaaaggatgcagtgctttgtaattatcaagtttaattgataatgtaaactctcaactatctaagtctcaactatgattttgtgtttcagttgaaagtgttattttcagagtttacacagaccaaagcagacagtcaaaaactgagagaatgcttgaaagaggtgaaggagtgggtcttgcagatatttagggggaaggtgctccaggcagaaaggccaagagcagaagacagcgtggcatgattaatgaacagaaagcagcacggctgaagggggtcacatagggttctgcaggtcattgcaagtactttgcttttgttagtttattctgtcttttgttttgttttgtttttgtttttgtttttgtttttgagatggagtcttgctctgtcgcccaggctggagtgcagtggtgcaatctaggctcactgcaagctctgcctcctgggttcacgccattctcctgcctcagcctcccgagtagctgggactacagacacctgccaccacgcccagctaatttttttgtattttagtagagacacgtttcaccatgttagccaggatggtctcgatctcctgatctcgtgatccacactccttggcctcccaaagtgctgcgattacaggcatgagctgcacctggcccattctttctttctttaattattattgttattaatttttgaggcagtgttgcactctgttgcccaggctggagtgcagtggtgcgatctcgactcactgcaacctccgcctccaggttcaagcgattctcctgcctcagcctcctgtgtagctgggactacaggcatgcaccaccatgtccactaacttgtatttttagtagagatggaatttcttcatgttggccaggttggtctcgaactccagacctcaggtgatccgcctgccttggcctcccaaagtgctgagattacaggtgtgagccactgcccccagcttttttgatatatttctttacaatctttttttctaggcatatatactatattgcttattaaaatttctgtgtagatactattttataatctatatatatatacactttaataagtagtttggaaatatggcatttaatgtctttcaaaaattatatcattttgatatacataagttgttttaacccttttcttatcattatcacttctgttgtttctagagcttttttctgttataaatacactgtaattaacatccgtttgaataatctttgacagaatctcttaatattttctcaggcagcgtgtctatcaataagatctaaagttatgaatacgcttaaaattcttgatttaaattaccaatttttttccagaagatcatatattctacatttctaccaatagtgtatggacatggctgtttcgccatattcttattacacaaattgtttatacatttttggtgggtttttttgtttgtttttttgttttgttttttttgagacagagtcttgttctgtcatccagtctggagtgcagtggtgcaatctcagcttactgcaacctccgcctcctgggttcaaactattctcctgcctcagcctcccgagtaactgggactacaggcatgtaccagcacgcccagctaatttttgtatttttagtagagatggggtttcaccttgttggccaggctggtctcgaatgcctgaccttgggtaatccacttgcctgggcatcccaaagtgctgagattacagatgtgagccaccacgcctggccactcttttttttttttgagacaggatcttgctcgctttgttgcccaggctggagtgcactggtgagatcactgcttactgaagcctccatctcctgggctcaagcgatccttgcacctcattgagtagctggggccacaggattgtgccatcacacccaactaatttttgtatttttttttttttttttggagacagggtttcaccatgttgcctaggctgttctcaaatgcccaggctcaagtgattcacccacctcagcctcccaaagtgctgggattacaggcatgagccaccgtgcccagcctgatacgtttttagaagcagaaaaaatttgattaggaagaaagggcatacagattgttttaaaattatacatcttttgaattttgttttaggcttatagtatagtggagtatttttttgtgtctgtgaaattaactgattgcttaggagttaaaactgacaaaacttagaggtgaagagaaaaagagaaaatcagaaattaatgtgactatgaagtttctggtttgtgcatctggtggatggtggtaccattggatgagatagaaatgtgacagggaagttgggacagggaaaaactgtataattccatgtgaacaatttaagttgaagtcattggatctaattcagtagatctagagctgtgccgccagcataatagccactagcctcatatggctattgagctcttgtaatgtggctaccctgaattgagatgtgctgtcagaataaaatgtacaccagatttggaactctttgtaagaacaaagaaggtaaaagataaatgatagtatcagttaagatccaatcaggagacaaatcacacagtaatttgaacagggaaagtttactgtaaagaattattaagtataatggggcaactataaagatgtaaaagataactctaaacaatatcccgaggctaaggaagtttctaatgagggacaaacttggatgccagcctccgttccaaagggattcagatcactggagaagatacggttgcaacccagtggatgacagagaagtttgctgggttgtccaggtctgagctggtccacagttactagacaagcgagaaacagggtacaggtgggctaagactggtgtgcaagactacaggtatgcagagggactcaaagcattgggaacaactctggctgacagatgcatagcctagagtggacagtgtccatgtcaggaggccatgggaaacactctttggggtgcaggcagactagggctggtgggcaggtatgcagagggagttggggcatctgcttgccaatagggtggcatgaggcctggagtatgtggggtttgttttgggaggggcagtgaggtggtcactgggttagggctagggttgtcagcttactgagagactgcatactcttgagtgtgctgctgggccggagtgcctggatgtctctatacacggccacatgtggctgctgaaagcagcccagcaggaacaagaataaaacaaaaaacacagcattcaggaaccaggaagagaagttcctttctccagcaatgaccttctactgaagaaagcttaacattatgcttgctgcaaaaaagaaatgcttaaagcttcattatcacagagctggtaatgcagggtaaaattagacgtgaaagacaataaattgataactgaaacactcattaatttttatttattttattttttttgagacagagtctcactctgtcacccaggctggagtgcagtggcatgatctcagctcactgcaaccttcatctcccgggttcaagcgattctcctgcctcagcctcccgcgtagctgggattacaggcacccaccaccatgcccagctaactttttgtatttttaatagagacggggtttcgccatgttgcccaggctggtttcgaactcctgagctcaggcaatccgcctgcctcggcctcccaaagtgctgggatttcaagcatgagtgcattaatttttttttttttattgactaatgttgaaatgatatttttgatgtattaggttaaataatatatatcattaagaataatttcactttcctttttagtttttaaagtgtacctagtcaaaaatttaagtaacatatatgcttagcacttggacagttctggaatggatgtctaagctaggtagattacttccataagaactgatggaagggcctaggaggagagtgtagagagaggagagattataggccccaaacccccaaatttaaaggttggtgtgatgattaattgtatgtgtcaatttgggccatgaggtgctcggatatttggtagaacagtattctggatgtttacatgagggtgtttttggaggacattaacatttcaaccagtagatggactaaggcggactgcctccctaaggagctgggccttatctaatcagtgaaagcctgaatagaaaaaaaaaaaaagctgaccctcttccaagtaagggaaacttccttctgcctgattgtctttgggatagggcatcggctttttcctactctaggattcaaactgaaacaatggctttacctggggtcttgagcctgctgggctctggactgaaactacaccatcagctctcctgggtctccagcctccagcttgcctactcactctgaatatcttgggacttgtcaggcttcataatgaagtgagccatttttaataataaatctcattttctccctcaatacgtatacatggttttggagaaccctaactaatacataatacagttgagtatagaaagaagaacccaaggaattccagagagcatgggtgggtagcaaatggaaaatgtaaattcaggaagaaagtttcctgctaatgagaagaaattccagaacatgttagtatgctgatggcaataataaagaagagtgaatggagttggcaatggaggctgtaagggataaaatattatatgtttggcaagagtgcaaggttttgctaggcacatagggctagtgcagcaagctttcagtagtgaaatggtggcaaccaggtcagaatttcttggaatgagggtaaatcacaccttcctcggtggtgagatggggatatgggtactgcttttcatagaacaaactgtccggccagggggatggtggctcacacctgtaaccacagcacgtttagaggccaaggcaggtggatcacctgaggtcaggagttcaaagccaacgtggtgaaactccgtctctactaaaaatacaaaaattagccaggtgtggtggtccatgcctgtagtcccagctactcaggaggctgaagcaggagaatcacttgaacccgggaggcgggggttgtggtgagctgagattgtgccactatactccagattgggcaacagagtgagactctgtctcaaaaaaaaaaaaaaaaaaaaaaggaacaaatcttccttttctagaggacagaaaggaatagataaaccttacaagagctgatgacagaatgccgtcatgcccctaatatcgctctgtggttatatttcaaagagttgacagcaatagaatgacattgacttattcattctaggccaaggaactactaaattctttaacagccgaattactttggcatgaattatctggacttttcaacactgatctgatgtttatacaagtgtatttcctttcaaatagtcttgatgcttcctttttctctttcacactttacctacttttgtaatatgcacaaataagatatgaaacactacaaaatagggtgtagataaatttcgattagaaaactgtataaaattaaacaaaagaacaaaaatgtagaaattgggttttagcaatgtgttcttatctgacaatataggacaaagaaatgtttggctctagtttccgaaagctatcattggagaggtgactggggaagagatttattgaagttatcctttcaattttggtctgagagtcctcatcttggtgtgaaaccttggtcacctgagaaagtcctttaacccttttgagtctcaaattcctctttgggagattgcattatgtaagactaaccttaggataaccttaggaataagaaaataaagaaatcgaaaccccatatagtatcagctccataaagtcaacaatctccacaagctatcaagtgataagacattcttgtgggtagtacatcctggttgtacaaatcacaggactcaatgaataaaggaagctgggcacaaattggagagcatcttggacttgggactctgcagactggtgctatgtccctgactgtgtggcttgcctctctaggggactggggaaccttgctcatctaagtttcgtgcttggtaaaaatcagatgataatagctactttggttcacatttagagtttttaaaaataatacctgggggctgggtgcggtggctcatgcctgtaatcccagcactttgggaggcagacgcaggcagattgcctgaggtcaggagtttgagaccagcctggccaacatggtgaaaccccatctctgctaaaaatacaaaaattagccgggcatggtggcacatgcctgtaattccagctattcgggaggctgaggcaggagaattgcttgagcccaggagacggaggttgcagtgagccaagagggtacactccagcactccagcctggccaacagagcaagactctgtctcaataaataaataaataaataaataaaaagaatacctggaaaaatgtgcatctcagggagagtctgtatacatgccctaataaaacaacatgaacttatactctgatatttccttaatatgttactgtgttaattaaatatttttatggctagatttgtaatttacaagtgctgctttattatgacacacagtgtcattgaagaggagagcggacttcagcacattttgttccttaagggagcttaaattggatctaaccagttcaaaagtgaagtgaaaaaaaaacacacatctccactgaccaaaaaaagagtgaggtggagatgatgaccatatcgtgggtcagcatttctgggttatttggttagtgttagtctttttgtttttgttttttgtttgagacagggtctcactctgtcacccgggctgaagtgcagtggcatgatcacagctcactgcaacctccgtctcctgggctcaagcaattcactgcaacctccacctcccagactcaagtgattcttctacctcagcctcccaagtagctgggaccacaggtgggtgccaccatacttggctaatatatatatatatttttttggcagagacagggtctcactgtgttgcccaggctggtcttggactcttgggttcaagcaatcctcctgccttagcctctcaaagtgctgggattacaggttgtgcccaaccagtgttagtcttcttttacttgattacacttaatggttgtaagcctggagacagaggctccttgttaaagagaaaccacacaaatagttatgaaagttatttagtaagttaatggattcattgatttgaagaagtaaaaagatgtttgtttcctcagttgtttttttttttttgaaaaaatttcaaacctacggaaaaaaagtaagaatattatcatgagctcccaaatatcctccagctagattaatcaattatttactgagacatttggaagtcagtttcagacatcaagatattcagccctagcactttaggaggccgaagcaggtggatcacctaaggtcaggtgttcaagaccatcctgaccaatatggtgaaacctgtctctactaaaaatagaaaaattagcggggcgtggtggtgtgtgcctgtagtccagctactcaggaggctgagacaggagaattgcttgaaccagggaggaggaggttgcagtgagccgagattgcgccactgcattccagcctgggcaacagagcaagactcagtctcaaaaaaaaaaaaaaaaaaaaaaaaagtacttcagccctgtagctttagtgttgaactcttaaatcattctcagtaccattatcactcctgagagaattagtatcaattaataatatcacatagatgctgtccatatttaaatttctccaaatgtctcccaaatatttattacagcttttatgtaacctagaatctaattaagtatcatacattgcatttagctgttacatatcttttgtctcttttaatcctagactgtgtgaatatcctattccccaatatcctttcatccagaagttttagtacccattactgatccttgcctgaatcagagattatacagagattatataggccttgcaaaaatggtggttttaaaattttatcatttcatctgtatttgctagtggacataaagaagatctctcattctctctcagcatcactatgcactgatggatatttggtgggtggggagttataatctattactatcattatttcttttgatggtcaaattatcccaaatttgtcagcagttcctccttcaagctaccttatttgtgcgtatctgtgtatgtgtgtgtgtgtgaatgtgtctgtgtgtgtgaatgtgtctgtgtgtgtgtgtgtgtttgaatgctttctagctttctggcataagaaatatgttctaggctcatcttagtctttctctgctctagacctgaaactgttatgtaggtagtcaagcagacctaagcagggcaggagagcccctactgccccccaaccaagaatgtcagacaaccatcaggtgatggtcaggcggttatcaaactgcttctctaaaataataattggttgcagctggcatcaggaaaaggcagtctcccaagagatagaaacacttaaagttggtgatcagcagcttcccagtaggatctcaggagttggttgagtggtctcaagcatgcacactaagaggcaaatggcagagtttaactggtatatgaccttcctttaggaacactcaactggtaaggaaaaaacccctcaagtgagcatgtgcacaattttggtaaacacactgtgcatacagcccctttcaagtgttggcagtccactatgcctgcggacagcccaccccaaagaagaatcagggaagaaggattgcaagaccccagaagcatgccaatgtataagaccccaagtcaaaggtcaaacagtgcacttcaatctctcaagttgctggcttggccctcttccaggtgtactttacttccttttgttccctctaaacttgttagtgaactttcattcctgctctaaaacttgcctaggtctttcactctgccctatgccccttggtcaaattctttcttctgaggaggcaagaattgaggttgttgtagacctgtacaggttcgcagctgctaacaaaactagtcacttctccaaatagctctggttccttcgaagggggaatggtgtttaggaaacaagatctgggtgctagtgtttaaatcacctttgcaaaaatcataatagtgagaaaattgtaacagtgaaagaggtcttacctaaccaacttcatcttgcctttcacctccaaactgcccttgatcatttctgggtgtgaaccaagctaactttgggagaaatttagtttataatttcaatggtaataacccttcccaaagccatttatttgttctgtagctcacgacattttcaacttccccaattactctcataaataacatcactattgtagaacctgagattgaccttttgagatgttttttcaggcttttgcatgtatgatgaccagatggccccacccagaccagcaactcctctgtggcccccacccaaaagtggactcagctcatgaggaccattttctacaccaccgtaattgcatttccaaccactcagcatcacccattccctagccccctgcctgccaaactattcttgaaaaaccctaaccttggaatgtggtgggaggctgatttgtgtaataataaaactttgagtagggcatggtggctgacacctgtaatttcagcactttgggaggaggctaaggcaagaggattgtttgagcccaggagtttgactgggctcatagtttgcctgggcaacacagtgagaccctgtctctccccactacaaaaaaaaaagttagccaggcatggtggcacatgcctgcaatcccagctacgtgggaggctgcggcaggaggatgcttgagcctgagaggtggaggctgcagtgagctgtgattgcaccactccactccagcctaggtgacagaatgagaccttgtctcaaaaaaccaaccaaacaaaaaagctccagtcactcatttagctggctctatttcaattcccctgtcttcatcaataattagttctgcctaggaaatgggcaagatgaacccattgggcagtttcagtgtctcatagcaaggggtagattcagatttgtagagcctgaagctactacaattttgggactttttttttttaaagaaaaggaatgtaaagttacaaatataaaattagtatatggctttagaagtggtccctcagtgaagggctatatattttaaggtttattagcttcattattattgggatattattgttcttgggatctttcagtgaagagaatgttcaaatgcaacaccacgggtttatttcttagcttctgtcatttcctattttgtataaaccagaatgaaaatcatgcttccagagattatcaatatatttgttcatttgctctatcttactattttcacacaagtggtttccagccaggcacaatggctcatgcctgtaaatcccagcactttgggagaccgaagttggtggatcacttgtcaggagttccagaccagccaggccaacatggttaaaccccgtctccactaaaagcacaaaattgccagggcatgggggtgggcacctataatcccagctacttgggaggctgaggcaggagaatcgcttgaatccgggaggtggaggttgcagtgagccgagattgcaccactgcactccagcctgggtggcagagcaaaacaacatctcaaaacaaacaaacaaaccaataaaaaatggtttcagaagcataacaccaatatcctaccaaaaacaaacctactagtaatgttcaagattttctttcatttcttcttaatatgttatatgtcctactaaggatatatagccaaagtactatagtcgaacgctatttaactttttctttatggttacattatcaattcaatatacaattaattttaattgtttctgtttgaattcaatttcagggtttgcttttttattctctttaatttaaatttattttttaaaaatgcagaacaatgttaaaagaaaaatcttagacaaattaaattgaacagagtttaattgtgcaaagaacaatttgcaaattgggcaatgtctccaatcagaataggttcagagagactctggcccttctgtgtggttagattgatggacagagaaaggaaagtgatggacagaaaatggaagtcaggtacagaaacagctggtttggttacagctcaaagtttacctcagttgaacagggtttgaacagttggctgcctttgattggccaacattcagtgattggcacaagagtgggctacagtctatttacacatctagttaggttagagttcactatatacacagaaaactttaagctggactaaaatatgtaaggaggcagctttaggctaaagttaatttacgacatttatgattaaaagtcaaaaagatacactgagaagtttcacttatccctctccctctgttattggaaagaggtcccagtccagaccccaagagagggttcttgaatctcatgcaagaaagaatttgggttgagtccacagagtaaagtaaaggcaggtttattagagaagtaaagaaaaaaaggggccggtgcggtggctcacgcctgtaatcccagcattttgggaggccgaggtgggcagatcacgaggtcaggagttcgagaccagcctgaccaacatggtgaaatcccgtctcttctaaaaatacaaaaattagccgggcgtggtggtgggcgcctatagtcccggctactcaggaagctgaggcagaaaaatcacttgaacctaggaggtggaggttgcagtgagctgagatcgtgccactgctctccagcctgggcgacagagactccatctcaaaaaaaaaagaaacaaaagaatggctactccatagacagagttgccctaagggcaactggttgtctactttttatggttatttcttgattacatgctaaacaaggggtggattattcatgagttttctgggaaaagggtgggaatttcctagaactgaggtctcctcccacttttagatcatatagggtaatttccaaatgttgtcatggtatttgtaaactgtcctggggctggtgggagtgtcttttagcatgtgaatgcattataattagcatataataagatttgaatggagttgctgtggttccattgcctctgacacttccaccccattcacactcatcctctataaggaactatttttattaatttatggctttttctctacttttttggtaaaaatctgaaaatatgtgtgcagtttcttatttctatttttttcttaaacatgcagtctattatatacactcttttgctcctttgcttcccccgctcccgcaacctcaatacatcccaggactcactttatatctgctctgctcatggagatcttcattctttttataaatggacaatagtccattgaatggcagctgggcgcagtggctcacatctgtaatcccagcactttgggaggccgaggcgggtggatcacctgaggtcagaagttggagaccagcctggccaacatggtgaaaccccatctctactaaaaatacaaaaattagccactagtaatgcatgcttgtaatcccagctactctggaggctgaggcaggagaattgcttgaacctgggaggtggaggttgcagtgagccgagatcgcaccattgcactccagcgtgggcaacaagagcgaaattccatctgaaaaaaatatatatatatataagtccattgaatgatggatgctctacagatgacctaactagtttcctatgaaaggtaatttgattgttgccaatacttaggttgctgttttagaaaattatatagactgcgctatgaatttaaacaagaaggaacttgaaaccactactgcaaaattataattgaaacagtgaaagagattggacctaaccaactctatcttatttctaacttctaagctgtccttactcattcttaggcataggctgaactaactttgaggaggaacatagtttatagtttagaacaaagacaataacagccctttcccaaaacaaaccttctttcctggggactggaccgcctttgcaggactaacaaattagccaaaagattagaaattatggtttaggagtcatacagctggaggctgtatgattctgaccctccccaaattgctcctgggaataacatcactattgtaaagcctaagaccagtgcttcagatatgttgcagaccctgcactggatggatcagcaggcaccactcagctcgataaactggctcatctgatcccatggcccccacccaggaactgacttaatgcaagacagctttgactccctatgatttcacctctgacccaaacaaccaggtctcccgacttactggctctcctccacccaccaaattgtccttaaaaactttgatccccaatgcttgcggagactgatttgtgtaataataaaactccagtcctctgcacagccggctctacgtgaatttccctttatgaattgcaattcccctgtcttgataaatcagctgtgtcttgacagtgggcaaggtaaacccattgggtggttacaaactgtgtacccaagcaataaaagtaacaatttgggaagtatttgagacccaccaaccaaaatttctttaacaattttggtctattcagtcattcatccattcatgtaaccactattattgggtgtcaagaactgatacttacttagaacgttaagagcattattcatcttgacataccaaatcatccgagttactgaaaattggtttactaggttccttacaaagaggttgcttggatttataaaatatgaggcagttgacccgagacaaggacgtagaaagtggttcatgtacccaatttttatttttcactttgaacccagaacattcacgactccaggccagaaattcaagactctgcagctagttctgactccagtcctagggtaacaagcccaccaagaatccagggcagatgtcctgaaaacccttcttgcggggtcaggagggcagcagaattttgggaccaaatctcaacaactggttttggtttcctcactcaccaagccacaagcctgcagagtgagaagaggtaaggaaaggatgaatgggcaatggagccagcccaggaccgggagctggtcctctctaacagcgaccccgcccgctttagctgagcgacccggggcaggttacatagtgtctctaacttaagccacgtgtttctcgaggaaatgctgagaggatctaatgggaaaacgtgggtacacgtcttagctaagaccctcgcccacgataagcccttaataagtagttatttttcagtggtggtgattaccatcgtcattattgttttgtatttgtaatcatcactgccacgaccatcaccgacctcttttacgcctccaccgggatccccacctcccagcctggcagttccaggctctggtgactcattcacttcctggaagtcctctaggcaacactttcctctcccgagtgacgactcctcagaaggcaggagatcccccccggaaacctttctctctccgtctctccctctaactcaaatctctcattcccgagtccaaactaagagagactcgcgccccaggagtcagccagcggcgcgggcgccttccccgcacgcctctgccgtctggaggacgcaggcgggagcgccccggaccgggttcacggtctcgcactcctgccgccggcgccccgcggtcccgccctagcaggctccttcccgggcccctccccgctccctcctctttctcgctgctcagtcacatctttctcttccttccaccccgagggaccatgtcgaggctcagctggggataccgcgagcacaacggtgagcgccttttcctgatccaagggggggtttgtgcgggggacgagaggactagcgcgacgccccggcgctcgctgaccacacactgggctcgcacattgagaaactttttcggttcctctttaaactaagcagcactcctgggagcccagtgcgagaagcggagagcagtcttgtcagggtagacgggttgttggtggtggatgtgagcgttggtgtgtgttatctctgtcaggattccccaaactcccaagtgttcatacgtgtgagttcaccttcatctgaaaagccaaggactttgcctagtaacagccacgtatcaattacaggcttggagatcagaagtctgatgacacacttcagtgaaataaggacaagttcgctttcagtcttttaagctcactattcacttaggagaaacaaatcatagaaaatctttaaaaatatatttaggaaatcttaacttgcattgtgacactgaagattaagttggcttcgtggcaaacaaaatactgcatgtttcctaatagttgttactgtaaatattcccacagcaatttgcagttggctgactactactggggactttagtaagggttcaggttctcgctgggaaattaagttacattgtgggttacttctccactcttcttctccacgctcatccttgcagggtgagcaaaggattactgaaattataattcattgatagaaatgtattaataggataaataataatgacatacacttttcttcttgtatatcacacattatcaaaagtaaaacattttttcttgttcctacgttaaactgaactgattgtttaaataataattatttgaaataatcgcagtgacaccaaaaagccttatagtgaataactgtcaaaattaaggcttagtttagccattcctcaatgtgcatatatttcaaaacatcatgttgtacacataaatatatacaatttttgtcaatttaagaagtaaatacataataaagaaaaaaattaaggctgtgaataataatgctttccttctattagcatgtacatgattaaacagtatagaatggtcaaattttatagaaagtttaatttcacaaactaacagaaaaattctatttctaattgtagcctgtttaatttctaattgtagcctgtttttaaacatgctagtttaaaaatggcagcaggtgaaatttataactttaataataaaaggtgtatagtcagatttcttcttgattaaggccataattataatcttacattttgctaatttccagtgaatgtttagggggaaaatatgacaaatcttttttcatttccctctctgctgaagtcgtttttattggagttatttaatagtcattgaatcccaactgcgcctttatggtagttaggaagaagaagggtatttcaatcaatcaatcaatggatattgattactctttagtaggttagaaattattcacctgaatgaagcttatttcagcaattttaaaaattcatcttagcaaagccattaataaggagtgattttgtatttctgttaggaattgttctgttaggaattagccattcctttcttttagatgcgatctctctctgaagaccacatccttacttaaaggtgtggtcttcagagaaagattgggaaaatcctattggaaatgtattatatactaactaggcaagttttttgtttgtttgtttgttgtttttgagatgagtcttgctctgttgcccaggctggagtgcagtggcactatcttggctcactgccatctccctctcctgggttcaagcgattctccagcctcagccccaccaagtagctgggattataggcatgagccaccatgcctggctaatttttgtatttttagtagagacaaggtttcgtcatgttggccaggctggtctagaactccagacctcaagtgatctgcctgccttggcctcccaaagtactggaattacaggcatgagccacagctctgggcctaactaggcaagttttttgtttttttttttttttctgtttaaacattggtaaaccagtgactgagcagataaaaggaaacttaagctgggaatagcaacactgataaaataaaacatcaagacttgaagccctgaaagggtactgccttcacaaataacttaggattcttcccctaacctttgactactttattagtttagtttagcgaatgtgacatcactgaaaagtgtatatcactgtaggtatttaaaagttcctaaatcagttgagcaaccaccacatatctctaattaagaattatgctggctgggcacggtggctcatgcctgtaatcccagcactttgggaggccaaggtgggtggatcacctgagatcgggagttcaagaccagactgaccaacatggagaaatctcgtttctactaaaaatacaaaattagctgggcgtggtggtgcgtgcctgtaatcccagctacttgggaggctgaggcaggagaattgcttgaacctgggaggcagaggttgcagtgagcggagatcacgccattgcactccggcctgggcaacaagagtgaaactctgtctcaaaaaaaaaaaaaaaaagaaaaagaattatggtggcttgcacctgtaatcctagctactcaaaagactgagatgggaggattgcctgaggccaggagttccagactagcctgcagggtcatgggggggacaaggagaaggaggagaggaggaaattttttttggaaaaattgaaaaaggggacctctttaagaggcagggtactgaactgactatggtagttagtagataatattgggaatgtgatacaaacaattattacttttattttattttggtttgacttctttttaaaatagttctgtttataaatgactggaaataggagagcaaagcaattaggagaagaaagcaactctattgattggaagaatgtcacctgcatattgtaacacatgcattgcgcatttgaaattgaattttcgttaggttaactcttacttggtggcagtgaaatagaaggctttttctgaattaagggggaaaaaagtctaggttatatatagaaaaagtactcagaaagatggtgaaagtattgaataaaaaaggctttttctgtaatacattctaagcaaggacttctgatgctcaagtggctttgaagtccagtttgtcagatgacatcttttaagctgagtgtatagttatatatttatgctatgactttttgtgcctgaagcatatatgaaagaatgtatgtatgtgtgagttctcttttgcaaaaatgaggcatagtaagcagtatcagatttagagtttgggccaggcgtggtggctcatgcctgtaatcccaacacttcaggaagctgagacatgcggatcacttgagcccatgagtttgagaccagcctgtagtgagactttcaacaaaaaaaagttttttataaaagtagctgggtgtggtggtgcacacctgtactcttagctacttgggaggctgaggtggaaggattgtttgagtttgggaagttgaggctgcagtgagctgagattacacctctgcattccagcctgggtaacagagcaagaccctgtctcaaaaaaaaaaaaaaaagatttagaattttatgctttaaagtttgttgatgattgtgatatattgcatttctttaaatattactctaaattttatcattttaaaatgtttttggttgtcgttagtaacaggtttaattaattgtcatgctatgatgttttaattagtacttgatttttagtgaaagattggttagcaaagtaggtgggtaaaccttagtcagtagcccagtgtaggtggtgatagctgtataaatttcaggaatagtagagagaataagaacctataacctataaagtgactcacatctgtagaatgacatggaacttacgtgaaactacagctttgctgctgattttgagaggcaagactttatagagtcttccaaagaagtgaagaggattgaaaagggaactgttagctgattggctcgtttcaatttccctaacatgtctgatttgtgaacttgatacgattttgacgtttttgagtagaggaccaggatgatacctttctcttgtgttgaaattcaaatgtaacattggcaaaataaccatagaagaaccttctgaaatgaagaaagagagaaataaattacaatctgactctactgcagataatcaacaatattacgtttcctgacgtggtgcagccattttatttggattatcctaggtgaaaaatttgtgtgtttccttggtatgcctgttgcacatcacaggtaattgagtggaggcctgagtgacactagacgatagcattgagtgatagaaggaagaataaagaagtaagcacagcatctttaagaatgacaccctttctttgcttcatggctttctcagcttttttgactcttccaatctgcaaacttgaactctggagcaatagctcatttttggagctgagactgaatgtcattgttttcaatgatgagttgtattattgtttttagtttggtagaaggttacctttggagagtattttataaaatttacagactcttgtctacaagggttactttaattctgaacatgacttaaggcacaccaagagtttcccacatctataataaaaacaactaatcttgtaaaaaaaaacaattagatgccaaggtcctgaggacgagaatctcattttattaatctttgcgttttcttcaatttcaagcacagtgtgttatactcaatgtatgtttgttgaaagaaagaacttatttaatccttttcttttggtcctatatatttaaggtcctattcactggaaggaatttttccctattgctgatggtgatcagcaatctccaattgagattaaaaccaaagaagtgaaatatgactcttccctccgaccacttagtatcaagtatgacccaagctcagctaaaatcatcagcaacagcggccattccttcaatgttgactttgatgacacagagaacaaatcaggttggcttttctttttttgtgtgtgtggtggtggatgaagggtttgaatgattagactatactctttttttttttttttttttgagacagagtctcgctctgtcgccaggctgaagtgtagtggcgcgatcttggcttattgcaacctccgcctcctaagttcaagagattctcctgcctcagcctcccgagtaactgggattacaggcgcacgccactatacccagctactttttttgtatttttagtagagacagggtttcaccatgttggccaggatggtcttgatctcctgacctcgtgatccgcctgcctcggcctcccaaagtgctgggattacaggcgtgagccaccgcacccagaatacactctctaatctttcatgttttgtttttgctagacctggaatttgtcaaattgaagcatatttttcttcgtgtgaattaagatatcttgttatatatttgaaccttcagataatcttaccttaaaataataaagagtatttggaaaaggatatgttgcatgataatttaaaattgaccttagcttgttattataacttcacttagcatttaccattataaaaatattaaagtttaatagtttttatagatatttcatgatttgtttctgcaaagttttagccgtaattattttagcattatttgcaaacctataatgccatttaagtacctgctttaatagaaaaagtttagtttaaaaaaaacttattctcttattttaattgccaaagtaatatccactcatagtaaatgaaacaatatggaaacatataacaaatattaatgtctctttcttcccacagtctctcctgaagtaactaatgttatttcttccataatatttcggtgcttagttatgtatacatacatgtgtatcatccttgttttgcattttcttattaaaaatacatttggaataatgctatataactctgaatttttttcttgtttaaaaatattttatagacatctttccagattaaaatatatcttgtttaaaaagctaaactgcagccgggtgtggtggctcacatgtataatcccagcactttgggaggctgaggtgggaggattgcttatgtctaggagttcaagaccagcttgggcaacatagtgagaacttatctctacaaaaaataaaaaattaatcaggcatggtggggtgtgcctttactcccagctactctggaggctgaggcaggaggattgcttgacttcaggaggtcaaggctgcaatgagccatgatagtgccactgtactcagcctgggtgacagagcaagatcctgtctcaaaagataaaaataaaagtaaaataattttaaaagttgaattgtattagctatgcttgtatcgtaatttatgtaccattctcctaacaatggacattgaagggagggaaagtagaagtttaatttttttaaaaaaataaatatatgaaacttttttactgtatattccctattagtacttttttctagaacacgtaatcatttcgtttaatgattagttcttgggatagtgtctttcacaccatgaataaataatggacttatagattatttgttaatttattaaataagtgatgaaaaaacattttcttgaagtgaatgtttaatccttcttcagactatctactgcccaagcagagattctgcccaaggtatcaagtttaaatgtaagatgagataaaatattagagagaatcatatttggaaacactttttagggcctctgacagattgtttttatttttaatctaagatcaggatgatgctgtatttgctctattaatgaaaaaatatagttaatttttaaaaatccttaattgaaagaaagtttttacttattaattgagcccagatttagattagtagtaatatcttgtatttatgtaaagccttattgttagcaaaaattataagcccaaccacatttcttcttcatatttgtcaaattcataaaagtagtaagtttttttttcttttctttttttttttgagacagagtttcactcttgttgcccaggctggagtgcaatggcacagtctcggctcaccgcaacctctgccttccgggttcaagcgattctcctgcctccgcctcccaagtagctgggattacaggcatgtgccaccatgcctggctaattttgtatttttagtagagacagggtttctccatgttaatcaggctggtttcgaactcccgacctcaggtgatccgcccgcctcggcctcccaaagtgctgggattacaggcgtgagccactgcgcccagcctttttttcttatttatttatttatttatttatttttttgagacaaggtctcgctccattgcctaggctggagtgcagtggtgcaatcatggctcactgcagccttgacctcctgggctcaagcaatcctcctgcctcagcctcctgagtagctgggaccacaggcatgtgctcccatgcccagctaatttttgtatttttcatagagaaaaggttttgccatattgcccaggctgatcttgaactactgggctcaagggatctgcccgcctcggtctcccaaagtgctgggagccaccacactggcctaagtagtacattttcatcaaagcattgtaaaaaatgcataaagacaaataaatacatggtattttcaacttttcggaggaaatgccaagtaaggagggacctggccttttatatacatgttcaactatatttctttcaacccctcagttttgtgaatctatgttaataaaagtggttaagccaggcatgctgacacacactggtagaccccgctactggggaaggaggatgattagttaggcccaggagtttgagggcagctgggcaacatagggagaccccatctcttgcggttaatgtaatagatatattgtaaaagtgtccaagtcttctaaatacaaagtttataccacataagtgtagtttgttactgtttacaatatgtcaaacatttaaaaagtaagctgtctcagaaaataaaaagataaataaataaaaaaataaggccgggtgtggtggctcacatctgtaatcccagcactttgggaggccgaggtgggcagatcacctgaggtcaagattttgagaccagcctggccaacatgctgaaaccctgtctctattaaaatacaaaaattagccaggagtggtgacacacacctgtaatcccagctactcaggaggctgaggtaggagaatggcttgaacccaggaggcgcaggttgcagtgagccaagatcatgccactgcactccagcctgggcaacagagcaagattccatctcaaaaaaaaaaaaaagtaaagctacccattcctcattttagaatgagaaatgattatattttacttcatctaaaactttaagtatattttttataaatgtagacattcatagtgtaaaaattttctactctaatttgctctatgagaacccaggtttctctctctctctcttctgtttttctcttcctttcattttccttctacttcgggttaatcagtgaaatcaatttatgtttccagatttgacacttagtcatcagtagtgtgtgctctttcttttaaatgaagatccttttcctatctagttcacaataaaattaccaggattaattgaaaatatccataaagtactttgtagtcctctgaaacagtagctatgtaaatatgggtcatgattcttattctttttttctcaagataaaccaaaagagattgtttcatggtgatttgggagattaaatcaattaaaaagaagaaaccaccatagttaaacaagttttttttttttttttggttttgttttttttttatttttggtaaactataaaaaacacaaagatactttctgtagcaaaccacattaatttgaataaaacagtttccattttgtaaagaagccatttttgaccaggattaaccctgaatcccacctcaggcatgtcaataaaccacaggcatgaaatcttcctcatagttcttggagggcgtgtttggctggacacatccatgctccatagttaaacctttagagaactacccaaaaatcctttcaaaagggagtaaaagggaggaggtggatgtgaaatttttcccttccttcctcctccttcttcttctctctctctctcattctttctttcttttcttgactttctttgttctcaggctggaatgcagctgcccagccataactcattgaagcccggaactcctgggctcaagtgcttctccccacttggttgcacactaccatgcctagctcatgaatttttttttttttttttaagacaagatctcactctgtcacccaggctagagtgcagtggtgcaatctcagctcactacaacctctgcctcctgggttcaagtgattcttccacctcagcctcctgagtagctgggattacaggcgcacgtcaccatgcccaactaattttttgtatttttagtagagacagggtttcgccatgttggtcaagctggtctggaactcctggcatttttagtagagacagggttttgccatgttggtcaagctggtctcgaactcctggcgtttttagtagagacagggtttcgccatgttggtcaagctgatctcgaactcctggcctcaagtaatccacccgccttggcctcccaaagtgctgggattataggcatgagtcactgtgccatgcctggctcatgaaattctttaggaagacttccaattggctgtaatatacaggggaaatagtagtttgaagaagaaagacaaggctgttctcacctgagctcctggtctttctggactcaaacagtatctcgctgctttgggaacctcacctgaggccctaccacccttgctgtggctcccagggcattctggaattttcctaacacagaactctccacattatgttgtaactgctagttggcttctctgtctttccatttagctaaagctctctatgagcaacaactatgtcttacttacctacctagcatggtgcctggcacatggtaggtgctcaatacatgtgtgtttaagttacaaaaaaaaaaaaaaaacttgtatgacggaaagacatggaaaataccatgacatagcattgggatgccttagcatacatagattaactctcgataaaattacaaaccaccagaaatcaattaatatttgccgtttaacacttaaatagttaaacattattcattgctggaacctttatttttaaaaaatttgtggtactaatttttgtattttataaatgaaatagttcttggattatagtaggcgctcaataacaattagtaactactactactaacaataatggtgtgtgttctttttgtggataaaatatgtgtgctgaaattttaaaaagatatcaaaaagaaagttgtcttctgattaagaaagtcctgctaggaagagcagtaacttgatgaattcagtgatcgttctttaattttcatctctagaaaatgccaatttctcagttatgcttccattatctagttctaggtaactgcctgaagtcaaacaaattattcacaagatcttacactatatattcttaaaacaaaaacaaaaacaaacaacaaacagaaaaagatttagtaggtggacataccataggtgtataatccccccaggagccaagatagctaggaaatgaattggtaacctatgacaatgtgacaattatataaagctctattatgattatttgtttccttcactagactaagtttcttaaggataaggacaaacttgtttatcattgcatatttagtattgaataattgctagcccatcgtaagctcttaatgattgttgaatgagagagtagcttggtgtgtatatgctctgagtaaaataagccagatttaatgaaggttcttctggcttcctaaataatacaaggtcctactgagtgggaacatctgtgtcctttggtttctctctctctctccctctctgtctttgtcttggtataatcctggcagatttgtgctcttggctcttgtttctctagattccaagcaaattgcagatgtgctgttcatgtatctttacttcagagaacaagtttaccataaagtgattattctcaggttcactagtcctaagaacttagtttttagtgattcccggtaacttcagtagcatccctacaaactaaagtttgtggaagagtgctttaacaggtgaggtctcttattttatcttggtaatattaattgattcaagtactctctgggcactggagatacaggggaccaaaacagtttctgccttaaaggaatttgtatcctaattagcagagagtaaatgcgtgagcaaacagatcctgttgccagcttgcttgtcattcaagacagctgactacagtgtagtttaggaaaatggccagggttagcaaattaccaacaatttttaaaaagtcaaatttaaggctggtgtggtggctcacacctgtaatcccagcagtttgtgaggctgaggcaggaggatcacttcagaccaggagtttgagaccagcctaggcaatatgatgaaaccccatccctgcaaaaaaaaaaaatacaactagctggacgtagctgtgtgcgcccgtagtcccagccccagccgctagggaggctgatgtgggaggattaattgaggctgcaagtttgagccccactgtactccagcctgggcagcagagaccttgtctcaaaaaaaaaaaacaaaaacgaacaaaccccaaaacactgcaacctctgctttctgggttcaagtgagcacttttggctaatttttgtatttttttttttttctttttgtagagacagggtttcattgtgttggccaggctggtgtcaagctgctgacctcaagtgaggcacctgcctcagcctcccaagtgctgggattactggtgtgaaccaccacacccagccaaaaaatatatatataatatctctgtatacagatattaaatatcaaatatataaaatatacttatattaaatatatacatattaaatttatataaatataaatttatatttaaataataagatggggccttgctatgttgcccaggctggtcttgaactcctgggctcaagcgatcctccctccttggcttcccaaattactgggattacaggtgtgagccaccatgccaggcctgttcatggaaatttaataacgcttatggtatatttagcttccaacgcttcctgattctcccatatgctttaaacatgcccaataaagattaattaggatgagacaatttaggactatgttttctattaagaagcttttctatatacttaagatatgatttattgtcatagttttagagatcatatttactgaggaaattactcaaatgtactttgtcaaagtgacaaagatatgacagatttttgaaaaattatttttgtcctatatttcacatttccccaagaatatagaatttaaggacaaaaggtatgcttgctttgcctgtttttacagtaaaaaactgtgttgattgtgttgactgtgtgtcaggtagtaataagtgctttgtgttcaatttttcttctgttttaatgacagcattaggaggaggtcccattactatcttgtttttacacttggaagataaagcttagaagttagggtttgttgccaggtgtggtagctcatgcctgtaatcctagcactttgggaggatcgcttgaggccaggagtttgagaccagcctggataacatagtgaggccctgtctctacaaaaaaaaaaaaaaaaaaaaaaaaaaaaaagggctgagtgtagtggtgcatacctgtagttctagctacttgggaggctaaagtgggaggatgacttgaacccagaagttagaggttgcagtgagccgtgattgcatcagcttaggcaacagggcgagaccttgtctcaaggaaaaaaaaaaaagaagttagagtttgttcaagatcacataattaggaaaagacagcatgagtgtaggccttctaactgctgaagcctgtgctcaaaccacaatgctgcactgctctaccaagctcaaactggacctgtctgcatgtcacatccttattcagacaggctgacttatcctcaggtaaacacaaccattccttacctttcagaagtcctaatttctatgcctttctaaccagtatgtctgttacgatttcccaggtgttccataaaaatctgtattgtggatgctttaagcttttaaaaatgttctattttcaatctacacatatttaaaagtggtattcttgtcagcaaagcaaatgacacatttgtaaaaaattccttggaggacatggatgtatggagtaattcagggagatgttgtggtttgagcagcttatgtaaatattttttccttgctaacaatataaaacatgttgttgtttagttctgcgtggtggtcctctcactggaagctacaggttacggcaggttcaccttcactgggggtccgctgatgaccacggctccgagcacatagtagatggagtgagctatgctgcagaggtaagccataagacatatctgtgattcacagttttcccacatggtgggatttaaggggtacagagacaactttactgattccaaatagatcctgagccaattaggtatcttagtgtctgaaactgctttattcattcaatatgagagtttatgaatatgagagcttcagatgttgccctcctaagcgttaaaccaaccctgagagcttagggttatatgttcccattttagacataagtaaactggttgctggagagattaagtaatttatccagctaggaagcattgagacaggtttaaatctagatctgtctgatatcaaattacaaattgtttctatctactgaaaggccagtgagaagagagagaaagaaacatttgtcttagtccaaatgtggtcatatttcatccagatacaaatatccactaatatgtaaagaccacattaaataggtaatatttaaataggtaaatggcaaagtttcactgaggaaaaaaaaaaagacaaactcttctaaactctactttatctctatatttacaggtataaaataaaaatctgttattcagtttattggtaaatcataacacaataaagcattcattgagttgtttctactcctttttccttataattgtattcactaataatactctgtgcaggatctggattaaaaaatgctctactttttttaatcctttggttaaagaacaaagcataataagcttcaagtttaatatgattaaatattactaacacccaactttaccatgagatgaaagtgaattatatgactcaatcaatactattcacgtgaaaataatttggtttctgagtcgcctaggcaggacagagctaagttatcaggcaagtgcaatttttcttcatgttctcatggttactgagctgtagagtttagatgccctgtatagccctgctgttcagagaaatccgacaatcagaacttttttccagtttcactcttccattgacatgtacctctgccctttcaggttttcatctgaaatgtttgctttgccactaaatcacttgtgtttgaggccaagtagctttagagtatggaacctgctctgtcctcagggtagagaaataaaatgtacgtacaaagttttttatgatggtggacaaactttgtctagaaggtagaaagtgggactgctgaatttgtatggtgtctcaatttgcatcatttaccaaatagttttcatgtttgctttctaaagttttatgttctgaatataacatgttctaaatgtccaaagcgccctcggaactaattattggttgctttggatcactggtctctcattttccttaccaactcaggaaaattggtcaaaatgctgtgtgtggttacaccttgtactttaataaacttgaaagtactacatactcagagaggcttaggttttctgccagctggcaagtagtttcctgaaaagggtcctcctgacatatgtcagaggctcagagtctttacctgcagatcaagggccatttttgtagacaaagacttttttgttgttgttgttctgcaataaataattatcttttatttatttatttattttaaagcaaaccagtgaaggaaaggaccaaaacctttggttcacttatgtatttataaatggaaaaaatttataatgcaaatttcacttattaaaaaacttaggtacaacttacaacattacagataattattttcccttcttttgtttcacatggagaccttggagactcaattcatgttaagacacctaagtatgagtcctccaggtaaatattacacaaatcagaagcatcttggaatttttaagtatattttaagacatacatttttatgcatgctttaaacaaacagtattttatttattttttttttgagacagagttttgctcttgttgcccaggctagaatgcgatggtgcgatcttggcttactgcaacctctgcctcctgggttcaagtgcttctcctgcctcagccacccgagtagctgggattacaggcatgcgccaccatgcctggctaattttgtatttttagtagagacagggtttctccatgttggtcaggctggtctcgaactcccaacctcaggtgatctgtctgcctcggactcccaaagtgttaggattacaggcgtgagccaccgcgcccggccagtgtatatatatatatatgtttgtttgtttttaaatgagagaatctaacaaagaaactatgaccagcaccagcatttaaagataaagctttgtggataaagcttggaatagattttcttttttctttctttttctttgagacaggctctcgatctgttgcccaggctagagtgccatggtacaaacatggctcactgtagctttgacctcctgggttcaagggatcctcccaccttagcctccagagcaactgggaccacaggtgggcaccactacatctggctaattattttttatagagacagagtctggccatcttgcctaggctggtctgaaactccttgaatgcatattaaagaacagtatacaattccaaggttgggtgcagtggctcctgcctgtaatcccagcactttgggaggccaaggagggatgattgcttcttatttcattggcttatatattcattcattctttcactcagtaagaattcattgagaatcaaccatgctcctaatctttacacagcttactgatgcttaccctgaaaggagtgcagcctcacacatatttgaggtcagaaaatgctgccctgtgggataggcatccgttttaagttaaacctggtttaacttaaaacctggtttggttgaaggggagggaactaggtcaagtggggggacagcagtggttttgcataaaatcatgtgtgaggatgtgggttgggaaggaggctcatacatttgaaaaacagtatggcctttaacagtgtagttggagcttggagaatgaaggggagagttgtcagaggcaaagttggagaggctgggaagggcctgatcttactgaggtaagtcctggtaaggtttatgaaggtgattctaagtgcaatgggaagccactgaaaggctttccattgggaagtggtgatatttgcatttcaaaaataattcaactactgtttgagaatagattggatggaagcaggagtggctaaggggagctttggaggaaacttttggggaaagttccaggcaataaatgagagtgcaggtagaggctggctggctggcagtggcagctttagtggcatttgtcgattggtgggtttgagagtgagggagggcaggatccatgtttctaggttgagataggaaatgcagatagagaaagtctgggtcaaacctcaggcttggtggggtgggagaggtagacaataagcaaataaataaatggtgcatggtaagttctttgatgggaacaataccatgtgatctggtagagtggctgagggcttaggaaaagcttctttgaggtgatacatgagttgagactgactgataagaagaaagcattaagagaaaaatctagagagacctttccaggaagtgggagcagcaagctcaagttctctaaggcaggagtgaggctggcatgttcaagaggagaaagtcattggcctattaggattggaattaatgagaaaggaaaagttatgtgctctgtcctgatgaggcaggcagggaccatgccacatcgggtactgttgggcattgtaagcagtctgaagtttatctgtaatgcagtgggaagaagacaatggaaggttttgatcaggggaatgacatgttctgctttatattttacaaaatataactagctgctgggtagagaggaggccgctgtcaggcaaatgttgaagtagggagaaaaactagaaggttatggaagtcattcaagtgagcagtgacagtaatttggactctgggggtggtggagacgaagagagctggacaaatctatgatgtttgggagataaagtcaatagggtttgctgatgaaaaggatgtcatgattgaaggaaggaaaaacaggagtttagaaacactcttaaggtttcgatgtaagcatattggaggctggtggtgccatttactgaaatgtgcaagtctgggaaggagcaggttgcagagaggaattcactctctgttttagacaggttaagtttgagatgtctgttaggcattctaggctcatgttcaagtaggctattggataaaaacttccagtttaagaagaggtcaaggctggagatgggggcatttgggagtccttgcatttggtttcatgttcaaaagaacccctttgtgctcagctccgtgattccaaggagttgattagtttttccagccacttttgtacaaagttcatgaccatcatcaagttacgttcccttgtgagtaaaaaggagaagtgaaagaaagaaaaaagacatttaaagttgcaacatatacaactttaattttaggcctaatatgatggtttataatattacagagagattaaagtgatctaaatcaagaaaagttttatcccaaaagttaggcgtctacaaaactaggctaatcgtccattctgtgtttggaactttatctaatgaaagtttaggcagaatatatagcaagcattttaaatatgtagctaataatgaaactgatttcaacattcatcatggatttttggcatagtatttggcagtatattttgcataccactaatatggaatttgaaactgctaaattttaataatattatttagaaattagttgccagtagagaagaatctaattttcatttttgtagtggttacaatttcttgtcattcagttcaaatcactgctcttgtcattgttagtcaggaaatgtgagtttgctttttttttgttttaattaaaatataaatgctaatagaagtggtatcagttcctctgtgaaggtattgctgccagtcttaagtaaggtgtgtaggagagaaagaaaaatattttcttggcctagtttcccatcatagtttaaatagttgtacttttaactagcagaaggatggttatatataggatatatatatgtccattcatctctctttagttacacattcattttttaatcagttctggttgtgatcctaacgaagtcattctatatctttctctgtttggtctcatctcttactgagagaactggtgcattggcacagagccacttaaaacaattttaacatccttatcagcccttccctgacagtgaatgtcatctgtctcatgtgagccaaatgaattctgtttcatcacccggtgttttcaggtttctttcctcccccaactatctcacaccaacttggaacatggcactacaggaatctacttttatattgcacagtcttccttgattgtttgtgcatgatgcactgttttatagttgactgtttatgataattgttatctatccagaaattatctcctataaatttcctgtaagacatatttatctcctataaatttcctgtaagttatatttaaaggatgggataaacatgtatttgaatatgctaaatcctctctgtaacagtcagctagaaagatgatttgggcatgaaggctcacataagtatttccttcctgataaaacaaaagggattcattagaaggagatcttgtctgaagtcagtccctcatatcaggtccttggacaccatggcttgatcaccatttatgattgtagctaaatgttttaggcatgtcgcattgccctttggcttctgtctcactttgtccttttggggaagactcccccaaagtggttttctcctttatcgttattctgaaatctttcacacttgtgggtgtgttcgagataccgtattgcttgcaatggtaaaacatttaggatacctttaggtgttgcataaggccgctgcatatgagtagagttgtgaggtgggtgaagtctgttttccagagttccaggccccccacctccttcccttcccccttgttttatctccctccttagtagcatcagctaccctcccattttctacctctttttcccccattgaaacttgctctcagcaaagtatctaaacatattcatagaacgtggtaaatgtatcaaaatgataagcatttttatgtgcgagatgacaaatattttaattagtttgatttaatcattccacatttatacatatattaaaacattgcattgtgccccataaatgtatacagttatgatttgccaattaaaaatgctcttaataaaaaagtttgaatgctacttaacatgattacatgattactcataaggagactttgtgttttcaagccataaatagtcttaaaatgacaggtagtaaacatttaactggacagttttagaaacagcctcactgtccttggtagcgggattgtcctggaaaacctactgtgtcggaggttgacttctccacccatctgtgagctcagccctcttccatggactttactgccagccgggatttgatttgaggctgctccattgcagtctcatctgtggaaggcctggaggagcctccagttacttgggagcaatagctggagtttgttagggctgaaggggctgtgaaggatgttcaaggcttttttaaaaatttatttattttctgatatgaagtgtcgctctgttgctcaggctggagtgtggtggcgcagtcttagctcactgcaacctccacctcctgggttcaagtgattctcctgcctcagcctcccgagtagctgggactacagtcatgtactaccatgtccagctaggatgctcaaggcattctatatagtctttaatatagtggaccacagactagttaagtgactgtgatccttcactgcatgaactttcacttttggacaaaaataaacaagaggattctgtccaagattcttgtgataaatacattatacataagtgtacagcaccagaaaatttgtaaatgttttatttgcatttatgtttttcaggatgtctaacaaaacattcctactatgttgtatatctccctttcagctccatgttgttcactggaattcagacaaataccccagctttgttgaggcagctcatgaaccagatggactggctgtcttgggagtgtttttacaggtgagaatctactgttttcattttaaatgatcagccttgttgaagaaagagcttcagtcacgaagtagacattcaaccatcttgtttaatagtaaattcattttaggtgtagcagtttccttttgaaatgaatatttaaaaattatatattcatttaggagcattgtcttataagtcttcttattgtccattgatcatttttatgtgaataacaatagcagcatcaacatcaagaatagtagcagaaataacaactgagatactggaagaaaacatttattctgggctcttcctaattgtatactatttaggacagaataaagttcaagctcctgattcttgaaacactggtctcaccacaatgacatattgtcccaatgtgctcactggtttttaaaaaaattttattgtatttcctttaatctaacgttcacatgtggttagacaattattgtcatcatacctgggaacaggttgggcttctcacctccctctgcctccacattcttgtaggtgtgcccctttgtcacaccccatactctccatgtgttgtaactcatgaacagagaatgcttcacggatggcaacaattccttgcctttggacaccaagtaggggtggttgcggcaggatccgggtgctttaaaaccttcaggtagattcagatcacctgtaataatgaaaagaggatcatttatgtatctataatttatgatgagtttgcttatgatgatatattcccttgatttgggacctcaaatcattttaggctgcaagtgtgagatgtttgcatctagtattttgatgccaccattgtccgtttgaattgaggggctgactgtcacatctagcttagtagtgcaggttatttgttagactgtcttatgcaaagtttctctcaagttaacctacatcttaaacactgataaaacttaacaaatattaagctgtttctattagttttgggactaagctgaaagttcagtacaggaaccctgtaatattatcttgttgttcagatccttctggcatgataaggctggcaggtaaaagagaagctttgttgtagaacaatcactgtatgttctgtgctggctaaggtttttttaaaaaataatttttaaatagtggctgaaattgagtgattcagacttgatctgctacagtaaccatttcttttgaaatttcatgtttttagattggtgaacctaattcccaactgcaaaagattactgacactttggattccattaaagaaaaggtaaaatgaattactgttaataattaacatatttcttgttctctcccacattctcttatcttcctttaaagacttagacatatgctgcctgctttgaagtttgcaacatacttgatgaaaaaaagcagaagtaacctattaccacttatcttttgaatgtaaaggtcttaaattacctaaaataaacatgaataaatatacttatgcataattagtctctggtattatattacagagtaagcctttaattgtaacacatttaagggaccacttatatgaaaacaaaccttatgcttcttaaataaatctatgatatgttactttatctaaaatttttaagatgtagatgcttttttaaagatactaaaggaagatattacataattctagatgcagatattctgtattgtttatggaattataatggaagtacatggatgtatgttttttgaggtctatgtagagctatcccattgtaatttgtgggaattctttttgatcctccagggtaaacaaactcgattcacaaattttgacctattgtctctgcttccaccatcctgggactactggacatatcctggttctcttac

SEQ ID NO: 508 - DNA, 908 bp, Homo Sapiens
atgcagcagaataaacaggatccaccacctttctctctaggtcaaattcctggaaatatctggaggaacattcacgactccaggccagaaattcaagactctgcagctagttctgactccagtcctagggtaacaagcccaccaagaatccagggcagatgtcctgaaaacccttcttgcggggtcaggagggcagcagaattttgggaccaaatctcaacaactggttttggtttcctcactcaccaagccacaagcctgcagagtgagaagagtcacatctttctcttccttccaccccgagggaccatgtcgaggctcagctggggataccgcgagcacaacggtcctattcactggaaggaatttttccctattgctgatggtgatcagcaatctccaattgagattaaaaccaaagaagtgaaatatgactcttccctccgaccacttagtatcaagtatgacccaagctcagctaaaatcatcagcaacagcggccattccttcaatgttgactttgatgacacagagaacaaatcagttctgcgtggtggtcctctcactggaagctacaggttacggcaggttcaccttcactgggggtccgctgatgaccacggctccgagcacatagtagatggagtgagctatgctgcagagctccatgttgttcactggaattcagacaaataccccagctttgttgaggcagctcatgaaccagatggactggctgtcttgggagtgtttttacagattggtgaacctaattcccaactgcaaaagattactgacactttggattccattaaagaaaagggtaaacaaactcgattcacaaattttgacctattgtctctgcttccaccatcctgggactactggacatatcctggttctcttac

SEQ ID NO: 509 - protein, 303 aa, Homo Sapiens
  VARIANT (1)...(303): Xaa = Any Amino Acid
MQQNKQDPPPFSLGQIPGNIWRNIHDSRPEIQDSAASSDSSPRVTSPPRIQGRCPENPSCGVRRAAEFWDQISTTGFGFLTHQATSLQSEKSHIFLFLPPRGTMSRLSWGYREHNGPIHWKEFFPIADGDQQSPIEIKTKEVKYDSSLRPLSIKYDPSSAKIISNSGHSFNVDFDDTENKSVLRGGPLTGSYRLRQVHLHWGSADDHGSEHIVDGVSYAAELHVVHWNSDKYPSFVEAAHEPDGLAVLGVFLQIGEPNSQLQKITDTLDSIKEKGKQTRFTNFDLLSLLPPSWDYWTYPGSLX

SEQ ID NO: 510 - DNA, 1814 bp, Mus Musculus
gcttattgcaggcatccagccagcgcataactttagaccaatggaagaaaaaagcagcaaaagttgaactgaatgacacccagaagcaagaaattaaagaggcctttgacttattcgatattgatggatctggaaccatagatctgaaagaactaaaggttctgaaattatttctaagacagtatcttgtaacattttagttgtgtctttggttgatgaataagtcaaaacccagaattatcaaagttacatcctctatctgtaaatcttgttttactattataatgtgtgtatagttttatatgctattagtcattttaaagttcaaaatgcaatcatggcattattaaaatatgtcccccccccattgcagattgcaatgagggccttaggctttgagccaaagaaagaagaagtaaaacaactgatcgctgaaatcgacaaggaagggactggcaccatttgttttgaagatttttttgccatcatgagtgtaaaaatggtatagtctatttttcaaagaaaccccagtagagccttgtgcatggtagggctggagcgtagagatttcatgggcgaactggaactaggtattaagggtttgtagtggggatacgacagcaaggacagatattttcagaatggtaaagactgtaaagaagagtttaatcaggaagtactgatacaagacagaagggagcccaagccctgaaaccctggacctggcaatcacagagcacctactttggccactgtacctgagaatactcccagctcttggagcttgctgtcttatagaccctgagggcaggtgtgagtatgttgaaataattgtttaaagaactcagcctcctgatagaaatatgcgcatacagctgtagaattagtagacctacgaagtccagcttgatagaacaaataaccaatgacatttcattttctaaagagtgaaaaagatgaaaaagaagaaatactgaaggcatttaaattatttgatgacgatgctacgggaagcatatcactaaataacatcaagagggttgccaaggagctaggggaaaacttaaccgaagatgaattacaggtcaatcttgtttattttataattatactgtgtgtatagttttatatgggttgtataacatagttgttctcacacattaaaagcaaagattcctgttgagtttctatcactttacatctttaataattttcgtctttcatgttaccttttttttttttttttttttttacaggaaatgcttgatgaagctgatcgtgacggggatggagagattaatgaggaagaattcttgaagatgatgaagaagaccagcctttattagctgcttggtgccttccaagaggtttggacctcctgttaacagctttcctgttaagcagttcaatgatgtaatacctgagtgtatccatttctacgtttagtttaggttagtcccttggtgtctaatctgtgccagaagttatatgtccctaccaatgtcattaaatctgtagtagtaagaaacaaacagacaaacaaacgcatgatttatttgaactgtgagccccaaaacagtatttccatatggtattttaaagtcgtagattccaaagacatttgacttttatttttcagttgaataaacttggcccccagatccagatgaaattgtttttaaaaacaatctgaaaatggtatttttccattatttccttttatatgacttaaaaacacctgataaacatgttttttttaaatctgttccttcaatatgtaaagtattaataaaactagctgagatacagtgttt

SEQ ID NO: 511 - DNA, 719 bp, Mus Musculus
ggcatccagccagcgcataactttagaccaatggaagaaaaaagcagcaaaagttgaactgaatgacacccagaagcaagaaattaaagaggcctttgacttattcgatattgatggatctggaaccatagatctgaaagaactaaagattgcaatgagggccttaggctttgagccaaagaaagaagaagtaaaacaactgatcgctgaaatcgacaaggaagggactggcaccatttgttttgaagatttttttgccatcatgagtgtaaaaatggaaatgcttgatgaagctgatcgtgacggggatggagagattaatgaggaagaattcttgaagatgatgaagaagaccagcctttattagctgcttggtgccttccaagaggtttggacctcctgttaacagctttcctgttaagcagttcaatgatgtaatacctgagtgtatccatttctacgtttagtttaggttagtcccttggtgtctaatctgtgccagaagttatatgtccctaccaatgtcattaaatctgtagtagtaagaaacaaacagacaaacaaacgcatgatttatttgaactgtgagccccaaaacagtatttccatatggtattttaaagtcgtagattccaaagacatttgacttttatttttcagttgaataaacttggcccccagatccagatgaaattgtttttaaaaacaatctgaaaatg

SEQ ID NO: 512 - protein, 121 aa, Mus Musculus
ASSQRITLDQWKKKAAKVELNDTQKQEIKEAFDLFDIDGSGTIDLKELKIAMRALGFEPKKEEVKQLIAEIDKEGTGTICFEDFFAIMSVKMEMLDEADRDGDGEINEEEFLKMMKKTSLY

SEQ ID NO: 513 - DNA, 983 bp, Mus Musculus
gcttattgcaggcatccagccagcgcataactttagaccaatggaagaaaaaagcagcaaaagttgaactgaatgacacccagaagcaagaaattaaagaggcctttgacttattcgatattgatggatctggaaccatagatctgaaagaactaaagattgcaatgagggccttaggctttgagccaaagaaagaagaagtaaaacaactgatcgctgaaatcgacaaggaagggactggcaccatttgttttgaagatttttttgccatcatgagtgtaaaaatgagtgaaaaagatgaaaaagaagaaatactgaaggcatttaaattatttgatgacgatgctacgggaagcatatcactaaataacatcaagagggttgccaaggagctaggggaaaacttaaccgaagatgaattacaggaaatgcttgatgaagctgatcgtgacggggatggagagattaatgaggaagaattcttgaagatgatgaagaagaccagcctttattagctgcttggtgccttccaagaggtttggacctcctgttaacagctttcctgttaagcagttcaatgatgtaatacctgagtgtatccatttctacgtttagtttaggttagtcccttggtgtctaatctgtgccagaagttatatgtccctaccaatgtcattaaatctgtagtagtaagaaacaaacagacaaacaaacgcatgatttatttgaactgtgagccccaaaacagtatttccatatggtattttaaagtcgtagattccaaagacatttgacttttatttttcagttgaataaacttggcccccagatccagatgaaattgtttttaaaaacaatctgaaaatggtatttttccattatttccttttatatgacttaaaaacacctgataaacatgttttttttaaatctgttccttcaatatgtaaagtattaataaaactagctgagatacagtgttt

SEQ ID NO: 514 - protein, 170 aa, Mus Musculus
LLQASSQRITLDQWKKKAAKVELNDTQKQEIKEAFDLFDIDGSGTIDLKELKIAMRALGFEPKKEEVKQLIAEIDKEGTGTICFEDFFAIMSVKMSEKDEKEEILKAFKLFDDDATGSISLNNIKRVAKELGENLTEDELQEMLDEADRDGDGEINEEEFLKMMKKTSLY

SEQ ID NO: 515 - protein, 5 aa, Mus Musculus
  VARIANT (1)...(5): Xaa = Any Amino Acid
WSXWS
